(19) United States
(12) Patent Application Publication
(10) Pub. No.: US 2019/0177723 A1
(43) Pub. Date: Jun. 13, 2019

(54) COMPOSITIONS AND METHODS FOR TREATING DUCHENNE MUSCULAR DYSTROPHY AND RELATED DISORDERS

(71) Applicant: Sarepta Therapeutics, Inc., Cambridge, MA (US)

(72) Inventor: George Dickson, London (GB)

(21) Appl. No.: 15/765,466

(22) PCT Filed: Oct. 7, 2016
(86) PCT No.: PCT/US16/56093

§ 371 Date: Apr. 2, 2018

Related U.S. Application Data
(60) Provisional application No. 62/239,812, filed on Oct. 9, 2015.

(51) Int. Cl. C12N 15/113; A61K 38/17; A61K 48/00; A61P 25/14

(52) U.S. Cl. CPC C12N 15/113; A61P 25/14; A61K 48/0066; A61K 38/1774

(57) ABSTRACT

The present disclosure relates to compositions and methods for the treatment of Duchenne muscular dystrophy and related disorders. Modified antisense oligomers are disclosed for the treatment of Duchenne muscular dystrophy and related disorders.

### BACKGROUND

### Field of the Disclosure

[0001] The present invention relates to compositions and methods for the treatment of Duchenne muscular dystrophy and related disorders.

### Description of the Related Art

[0002] Duchenne muscular dystrophy (DMD) is caused by a defect in the expression of the protein dystrophin. The gene encoding the protein contains 79 exons spread out over more than 2 million nucleotides of DNA. Any exonic mutation that changes the reading frame of the exon, or introduces a stop codon, or is characterized by removal of an entire out of frame exon or exons, or duplications of one or more exons, has the potential to disrupt production of functional dystrophin, resulting in DMD.

[0003] Disease onset can be documented at birth with elevated creatine kinase levels, and significant motor deficits may be present in the first year of life. By the age of seven or eight, most patients with DMD have an increasingly labored gait and are losing the ability to rise from the floor and climb stairs; by ages 10 to 14, most are wheelchair-dependent. DMD is uniformly fatal; affected individuals typically die of respiratory and/or cardiac failure in their late teens or early 20s. The continuous progression of DMD allows for therapeutic intervention at all stages of the disease; however, treatment is currently limited to glucocorticoids, which are associated with numerous side effects including weight gain, behavioral changes, pubertal changes, osteoporosis, Cushingoid facies, growth inhibition, and cataracts.

[0004] A less severe form of muscular dystrophy, Becker muscular dystrophy (BMD), a related disorder as described herein, has been found to arise where a mutation, typically a deletion of one or more exons, results in a correct reading frame along the entire dystrophin transcript, such that translation of mRNA into protein is not prematurely terminated. If the joining of the upstream and downstream exons in the processing of a mutated dystrophin pre-mRNA maintains the correct reading frame of the gene, the result is an mRNA coding for a protein with a short internal deletion that retains some activity, resulting in a Becker phenotype.

[0005] For many years it has been known that deletions of an exon or exons which do not alter the reading frame of a dystrophin protein would give rise to a BMD phenotype, whereas an exon deletion that causes a frame-shift will give rise to DMD (Monaco, Bertelson et al. 1988). In general, dystrophin mutations including point mutations and exon deletions that change the reading frame and thus interrupt proper protein translation result in DMD. It should also be noted that some BMD and DMD patients have exon deletions covering multiple exons.

[0006] Recent clinical trials testing the safety and efficacy of splice switching oligonucleotides (SSOs) for the treatment of DMD are based on SSO technology to induce alternative splicing of pre-mRNAs by steric blockade of the spliceosome (Cirak et al., 2011; Goemans et al., 2011; Kinali et al., 2009; van Deutekom et al., 2007). However, despite these successes, the pharmacological options available for treating DMD are limited.

[0007] Thus, a strong need remains for improved therapeutic approaches for the treatment of DMD.

### SUMMARY

[0008] The present disclosure is based, at least in part, on the surprising findings that systemic treatment of mdx mice (a murine model of Duchenne muscular dystrophy) with a dystrophin therapeutic in conjunction with a myostatin therapeutic increased, among other things, muscle grip strength in the mice. In addition to increased muscle grip strength, this combined therapeutic approach also increased exon skipping efficiency and protein expression as well as other in vivo and in vitro endpoints over the solo therapy alone. These include improvements in body weight, muscle mass, certain muscle fiber hypertrophy and muscle regeneration, among others.

[0009] Further surprising findings relate to the age of receptive populations for treatment according to the methods and combinations, among others, described herein. It is generally known that young mdx mice experience greater defined periods of muscle growth and regeneration, and thus tend to have a milder pathology. See, e.g., McGreevy et al. Disease Models & Mechanisms 8:195-213 (2015). By contrast, aged mdx mice exhibit a much more consistent loss of muscle integrity and function, and are characterized by a more severe pathology that is difficult to treat. However, surprisingly, the in vivo and in vitro outcomes noted above were found to occur not only in young mdx mice but also in aged mice as well. This indicates that the compositions and methods described herein would be useful for treating older patients (e.g., pediatric patients seven years of age and older), with more severe pathology and poorer prognosis.

[0010] Further surprising findings relate to greater longevity and/or survivability in the treatment populations tested. It is known that despite being dystrophin deficient, young mdx mice have minimal clinical symptoms (McGreevy et al. 2015). Severe dystrophic phenotypes that better represent the clinical phenotype, such as muscle wasting, scoliosis and heart failure, do not occur until mice are 15 months or older. However, premature loss of life frequently occurs at this point, as the lifespan of mdx mice is approximately 25% shorter than wild-type mice. Here, however, the inventors have surprisingly found that treatment according to methods and combinations herein provided prolongation of survival in the mdx mice, from at least about 18 to 24 months, well-surpassing typical longevity/survivability in this model. These increased therapeutic benefits and lifespan observed in the aged mdx mice in accordance with the various aspects and embodiments herein is surprising.

[0011] Accordingly, various aspects presented herein include methods of treating Duchenne muscular dystrophy in a subject by administering a combination of a dystrophin therapeutic agent and a myostatin therapeutic agent.

[0012] Various aspects include methods of treating a subject with Duchenne muscular dystrophy having a mutation in the dystrophin gene that is amenable to treatment by an antisense oligomer capable of inducing exon skipping during processing of dystrophin pre-mRNA. The method comprises administering to the subject an effective amount of an antisense oligomer comprising 17 to 40 subunits, and further comprising a targeting sequence complementary to 12 or more contiguous nucleotides in a target region comprising an exon of human dystrophin pre-mRNA, where the antisense oligomer induces skipping of the exon; where, said oligomer comprises at least one subunit that is a nucleotide analog having (i) a modified internucleoside linkage, (ii) a modified sugar moiety, or (iii) a combination of the foregoing; and where, said subject has been administered a myostatin therapeutic that inhibits one or both of myostatin activity and myostatin expression in the subject to thereby treat Duchenne muscular dystrophy.

[0013] In various embodiments, said exon is selected from exon 7, exon 8, exon 9, exon 19, exon 23, exon 44, exon 45, exon 50, exon 51, exon 52, exon 53, or exon 55. In some embodiments, said exon comprises exon 23. In some embodiments, said exon comprises exon 45. In some embodiments, said exon comprises exon 51. In some embodiments, said exon comprises exon 53. In further embodiments, said exon comprises exon 8, exon 44, exon 50, exon 52 or exon 55.

[0014] In various embodiments, the antisense oligomer comprises 20 to 30 subunits. In some embodiments, said antisense oligomer is selected from SEQ ID NOS: 76-SEQ ID NO: 3485. In further embodiments, said antisense oligomer is SEQ ID NO: 76.

[0015] In various embodiments, said targeting sequence is complementary to at least 15 contiguous nucleotides in the target region. In some embodiments, said targeting sequence is complementary to at least 17 contiguous nucleotides in the target region. In further embodiments, wherein the targeting sequence is 100% complementary to the target region.

[0016] In various embodiments, said myostatin therapeutic is a protein or nucleic acid. In some embodiments, said protein is an anti-myostatin antibody. In some embodiments, said protein is a soluble receptor. In further embodiments, said soluble receptor is ACVR2. In some embodiments, said nucleic acid is at least one of an antisense oligomer or an siRNA.

[0017] In various embodiments, said antisense oligomer comprises 12 to 40 subunits, and further comprises a targeting sequence complementary to 12 or more contiguous nucleotides in a target region of myostatin pre-mRNA; and where, said oligomer comprises at least one subunit that is a nucleotide analog having (i) a modified internucleoside linkage, (ii) a modified sugar moiety, or (iii) a combination of the foregoing. In embodiments, the antisense oligomer comprises 20 to 30 subunits. In some embodiments, said targeting sequence is complementary to at least 15 contiguous nucleotides in the target region. In further embodiments, said targeting sequence is complementary to at least 17 contiguous nucleotides in the target region. In embodiments, said targeting sequence is 100% complementary to the target region. In embodiments, the target region comprises SEQ ID NO: 1. In embodiments, said exon comprises exon 2.

[0018] In various embodiments, said target region is selected from (i) a nucleotide sequence where at least one nucleotide spans a splice junction associated with intron 1/exon 2 and exon 2/intron 2; or (ii) a nucleotide sequence where no nucleotide spans a splice junction associated with intron 1/exon 2 and exon 2/intron 2. In embodiments, the splice junction is selected from a sequence comprising a splice acceptor site or a splice donor site. In embodiments, the splice junction is selected from a sequence comprising a splice acceptor site or a splice donor site. In some embodiments, the splice acceptor site is provided within SEQ ID NO: 2 and the splice donor site is provided within SEQ ID NO: 3.

[0019] In various embodiments, said nucleotide of (i) is selected from SEQ ID NOS: 16-43. In embodiments, said nucleotide of (ii) is selected from SEQ ID NOS: 44-70.

[0020] In various embodiments, the subject is a pediatric patient of age 7 or greater.

[0021] Various aspects include, methods of treating Duchenne muscular dystrophy, the method comprising: administering to a subject an effective amount of an antisense oligomer of 12 to 40 subunits, and further comprising a targeting sequence complementary to 12 or more contiguous nucleotides comprising an exon of human myostatin pre-mRNA; and wherein, said oligomer comprises at least one subunit that is a nucleotide analog having (i) a modified internucleoside linkage, (ii) a modified sugar moiety, or (iii) a combination of the foregoing; and where said subject has been administered a dystrophin therapeutic that increases dystrophin expression in the subject to thereby treat Duchenne muscular dystrophy.

[0022] In various embodiments, wherein the subject has a mutation in the dystrophin gene that is amenable to treatment by an antisense oligomer capable of inducing exon skipping during processing of human myostatin pre-mRNA.

[0023] In various embodiments, the antisense oligomer comprises 20 to 30 subunits. In embodiments, said targeting sequence is complementary to at least 15 contiguous nucleotides in the target region. In embodiments, said targeting sequence is complementary to at least 17 contiguous nucleotides in the target region. In embodiments, the antisense oligomer is 100% complementary to the target region. In embodiments, the target region comprises SEQ ID NO: 1. In embodiments, said exon comprises exon 2.

[0024] In various embodiments, said target region is selected from (i) a nucleotide sequence wherein at least one nucleotide spans a splice junction associated with intron 1/exon 2 and exon 2/intron 2; or (ii) a nucleotide sequence wherein no nucleotide spans a splice junction associated with intron 1/exon 2 and exon 2/intron 2. In embodiments, the splice junction is selected from a sequence comprising a splice acceptor site or a splice donor site. In embodiments, the splice acceptor site is provided within SEQ ID NO: 2 and the splice donor site is provided within SEQ ID NO: 3.

[0025] In various embodiments, said dystrophin therapeutic is selected from one or more of a protein or nucleic acid. In embodiments, said nucleic acid is an antisense oligomer. In some embodiments, said antisense oligomer comprising 20 to 50 subunits, and further comprising a targeting sequence complementary to 10 or more contiguous nucleotides in a target region comprising an exon of human dystrophin pre-mRNA; and where, said oligomer comprises at least one subunit that is a nucleotide analog having (i) a modified internucleoside linkage, (ii) a modified sugar moiety, or (iii) a combination of the foregoing.

[0026] Various aspects and embodiments include methods of treating Duchenne muscular dystrophy and related disorders in a subject having a mutation in the dystrophin gene that is amenable to treatment by an antisense oligomer capable of inducing exon skipping during processing of dystrophin pre-mRNA. In various embodiments, the method comprises administering to a subject a targeting sequence comprising formula (I)

[chemical structure]

[0027] or a pharmaceutically acceptable salt thereof, where:

[0028] each Nu is a nucleobase which taken together form a targeting sequence;

[0029] Z is an integer from 8 to 48;

[0030] each Y is independently selected from 0 and —NR⁴, wherein each R⁴ is independently selected from H, C₁-C₆ alkyl, aralkyl, C(═NH)NH₂, C(O)(CH₂)ₙNR⁵C(═NH)NH₂, C(O)(CH₂)₂NHC(O)(CH₂)₅NR⁵C(═NH)NH₂, and G, wherein R⁵ is selected from H and C₁ C₆ alkyl and n is an integer from 1 to 5;

[0031] T is selected from OH and a moiety of the formula:

[chemical structure]

where:

[0032] A is selected from —OH, —N(R⁷)₂R⁸, where:

[0033] each R⁷ is independently selected from H and C₁-C₆ alkyl, and

[0034] R⁸ is selected from an electron pair and H, and

[0035] R⁶ is selected from OH, —N(R⁹)CH₂C(O)NH₂, and a moiety of the formula:

[chemical structure]

where:

[0036] R⁹ is selected from H and C₁-C₆ alkyl; and

[0037] R¹⁹ is selected from G, C(O)—R¹¹OH, acyl, trityl, 4 methoxytrityl, C(═NH)NH₂, C(O)(CH₂)ₘNR¹²C(═NH)NH₂, and C(O)(CH₂)₂NHC(O)(CH₂)₅NR¹²C(═NH)NH₂, where:

[0038] m is an integer from 1 to 5,

[0039] R¹¹ is of the formula —(O-alkyl)y- where y is an integer from 3 to 10 and

each of the y alkyl groups is independently selected from C₂-C₆ alkyl; and

[0040] R¹² is selected from H and C₁-C₆ alkyl;

each instance of R¹ is independently selected from:

[0041] —N(R¹³)₂R¹⁴, where each R¹³ is independently selected from H and C₁-C₆ alkyl, and R¹⁴ is selected from an electron pair and H;

a moiety of formula (II):

[chemical structure]

where:

[0042] R¹⁵ is selected from H, G, C₁-C₆ alkyl, C(═NH)NH₂, C(O)(CH₂)_{q}NR¹⁸C(═NH)NH₂, and —C(O)(CH₂)₂NHC(O)(CH₂)₅NR¹⁸C(═NH)NH₂, where:

[0043] R¹⁸ is selected from H and C₁-C₆ alkyl; and

[0044] q is an integer from 1 to 5,

R¹⁶ is selected from an electron pair and H; and
each R¹⁷ is independently selected from H and methyl; and
a moiety of formula (III):

[chemical structure]

where:

[0045] R¹⁹ is selected from H, C₁-C₆ alkyl, C(═NH)NH₂, —C(O)(CH₂)ᵣNR²²C(═NH)NH₂, —C(O)CH(NH₂)(CH₂)₃NHC(═NH)NH₂, —C(O)(CH₂)₂NHC(O)(CH₂)₅NR²²C(═NH)NH₂, —C(O)CH(NH₂)(CH₂)₄NH₂ and G, where:

[0046] R²² is selected from H and C₁-C₆ alkyl; and

[0047] r is an integer from 1 to 5,

R²⁰ is selected from H and C₁-C₆ alkyl; and
R²¹ is selected from an electron pair and H;
R² is selected from H, G, acyl, trityl, 4-methoxytrityl, C₁-C₆ alkyl, —C(═NH)NH₂, —C(O)—R²³, —C(O)(CH₂)ₛNR²⁴C(═NH)NH₂, —C(O)(CH₂)₂NHC(O)(CH₂)₅NR²⁴C(═NH)NH₂, —C(O)CH(NH₂)(CH₂)₃NHC(═NH)NH₂, and a moiety of the formula:

[chemical structure]

where,

[0048] R²³ is of the formula —(O-alkyl) OH where v is an integer from 3 to 10 and each of the v alkyl groups is independently selected from C₂-C₆ alkyl; and

[0049] R²⁴ is selected from H and C₁-C₆ alkyl;

[0050] s is an integer from 1 to 5;

[0051] L is selected from —C(O)(CH₂)₆C(O)— and —C(O)(CH₂)₂S₂(CH₂)₂C(O)—; and

each R²⁵ is of the formula —(CH₂)₂OC(O)N(R²⁶)₂ where each R²⁶ is of the formula —(CH₂)₆NHC(═NH)NH₂; and
R³ is selected from an electron pair, H, and C₁-C₆ alkyl,

[0052] wherein G is a cell penetrating peptide (“CPP”) and linker moiety selected from —C(O)(CH₂)₅NH—CPP, —C(O)(CH₂)₂NH—CPP, —C(O)(CH₂)₂NHC(O)(CH₂)₅NH—CPP, and —C(O)CH₂NH—CPP, or G is of the formula:

[chemical structure]

[0053] where the CPP is attached to the linker moiety by an amide bond at the CPP carboxy terminus, with the proviso that up to one instance of G is present, and

[0054] where the targeting sequence is complementary to 10 or more contiguous nucleotides in a target region comprising an exon of human dystrophin pre-mRNA; and

[0055] where, said subject has been administered a myostatin therapeutic to thereby suppress one or both of myostatin activity or expression in the subject.

[0056] In various embodiments, each Nu is independently adenine, guanine, thymine, uracil, cytosine, inosine, hypoxanthine, 2,6-diaminopurine, 5-methyl cytosine, C5-propynyl-modified pyrimidines, or 10-(9-(aminoethoxy)phenoxazinyl).

[0057] In various embodiments, the target region is selected from (i) a nucleotide sequence wherein at least one nucleotide spans a splice junction associated with said exon; or (ii) a nucleotide sequence wherein no nucleotide spans a splice junction associated with said exon junction. In embodiments, the targeting sequence comprises a sequence selected from SEQ ID NOS: 76-3485, is a fragment of at least 10 contiguous nucleotides of a targeting sequence selected from SEQ ID NOS: 76-3485, or is a variant having at least 90% sequence identity to a targeting sequence selected from SEQ ID NOS: 76-3485.

[0058] In various embodiments,
[0059] i) Y is O, R² is selected from H or G, R³ is selected from an electron pair or H;
[0060] ii) R² is G wherein the CPP is of a sequence selected from SEQ ID NOS: 3486-3501;
[0061] iii) each R¹ is —N(CH₃)₂;
[0062] iv) at least one R¹ is selected from:

[chemical structure]

or
[0063] v) 50-90% of the R¹ groups are —N(CH₃)₂.

[0064] In various embodiments, T is of the formula:

[chemical structure]

[0065] where A is —N(CH₃)₂, and R⁶ is of the formula:

[chemical structure]

[0066] where R¹⁰ is —C(O)R¹¹OH.

[0067] In various embodiments, each Y is O, and T is selected from:

[chemical structure]

[0068] In various embodiments, T is of the formula:

[chemical structure]

[0069] Various aspects include methods of treating Duchenne muscular dystrophy and related disorders in a subject having a mutation in the dystrophin gene that is amenable to treatment by an antisense oligomer capable of inducing exon skipping during processing of dystrophin pre-mRNA. In various embodiments, the method comprises administering to a subject a compound comprising formula (VI):

[chemical structure]

or a pharmaceutically acceptable salt thereof, where:
[0070] each Nu is a nucleobase which taken together form a targeting sequence;
[0071] Z is an integer from 8 to 48;
[0072] each Y is independently selected from 0 and —NR⁴, where each R⁴ is independently selected from H, C₁-C₆ alkyl,

[0073] aralkyl, —C(═NH)NH₂, —C(O)(CH₂)ₙNR⁵C(═NH)NH₂, —C(O)(CH₂)₂NHC(O)(CH₂)₅NR⁵C(═NH)NH₂, and G, where R⁵ is selected from H and C₁-C₆ alkyl and n is an integer from 1 to 5;

[0074] T is selected from OH and a moiety of the formula:

[chemical structure]

[0075] where:
[0076] A is selected from —OH and —N(R⁷)₂R⁸, where:
   [0077] each R⁷ is independently selected from H and C₁-C₆ alkyl, and
   [0078] R⁸ is selected from an electron pair and H, and
[0079] R⁶ is selected from OH, —N(R⁹)CH₂C(O)NH₂, and a moiety of the formula:

[chemical structure]

[0080] where:
   [0081] R⁹ is selected from H and C₁-C₆ alkyl; and
   [0082] R¹⁰ is selected from G, —C(O)—R¹¹OH, acyl, trityl, 4-methoxytrityl, —C(═NH)NH₂, —C(O)(CH₂)ₘNR¹²C(═NH)NH₂, and —C(O)(CH₂)₂NHC(O)(CH₂)₅NR¹²C(═NH)NH₂, where:
      [0083] m is an integer from 1 to 5,
      [0084] R¹¹ is of the formula —(O-alkyl)_{y}- where y is an integer from 3 to 10 and
         [0085] each of the y alkyl groups is independently selected from C₂-C₆ alkyl; and

[0086] R¹² is selected from H and C₁-C₆ alkyl;

[0087] R² is selected from H, G, acyl, trityl, 4-methoxytrityl, C₁-C₆ alkyl, —C(═NH)NH₂, and —C(O)—R²³; and
[0088] R³ is selected from an electron pair, H, and C₁-C₆ alkyl, and wherein the targeting sequence comprises a sequence selected from SEQ ID NOS: 76-3485, is selected from SEQ ID NOS: 76-3485, is a fragment of at least 10 contiguous nucleotides of a sequence selected from SEQ ID NOS: 76-3485, or is a variant having at least 90% sequence identity to a sequence selected from SEQ ID NOS: 76-3485.

[0089] Various aspects include methods of treating Duchenne muscular dystrophy and related disorders in a subject having a mutation in the dystrophin gene that is amenable to treatment by an antisense oligomer capable of inducing exon skipping during processing of human myostatin pre-mRNA. In embodiments, the method comprises administering to a subject a compound comprising formula (I):

[chemical structure]

or a pharmaceutically acceptable salt thereof, where:

[0090] each Nu is a nucleobase which taken together form a targeting sequence;

[0091] Z is an integer from 8 to 48;

[0092] each Y is independently selected from 0 and —NR4, where each R4 is independently selected from H, C1-C6 alkyl, aralkyl, C(═NH)NH2, C(O)(CH2)nNR5C(═NH)NH2, C(O)(CH2)2NHC(O)(CH2)5NR5C(═NH)NH2, and G, wherein R5 is selected from H and Cl C6 alkyl and n is an integer from 1 to 5;

[0093] T is selected from OH and a moiety of the formula:

[chemical structure]

where:

[0094] A is selected from —OH, —N(R⁷)₂R⁸, where:

[0095] each R⁷ is independently selected from H and C₁-C₆ alkyl, and

[0096] R⁸ is selected from an electron pair and H, and

[0097] R⁶ is selected from OH, —N(R⁹)CH₂C(O)NH₂, and a moiety of the formula:

[chemical structure]

where:

[0098] R⁹ is selected from H and C₁-C₆ alkyl; and

[0099] R¹⁹ is selected from G, C(O)—R¹¹OH, acyl, trityl, 4 methoxytrityl, C(═NH)NH₂, C(O)(CH₂)ₘNR¹²C(═NH)NH₂, and C(O)(CH₂)₂NHC(O)(CH₂)₅NR¹²C(═NH)NH₂, wherein:

[0100] m is an integer from 1 to 5,

[0101] R¹¹ is of the formula —(O-alkyl)y- where y is an integer from 3 to 10 and

each of the y alkyl groups is independently selected from C₂-C₆ alkyl; and

[0102] R¹² is selected from H and C₁-C₆ alkyl;

each instance of R¹ is independently selected from:

[0103] —N(R¹³)₂R¹⁴, where each R¹³ is independently selected from H and C₁-C₆ alkyl, and R¹⁴ is selected from an electron pair and H;

a moiety of formula (II):

[chemical structure]

where:

[0104] R¹⁵ is selected from H, G, C₁-C₆ alkyl, C(═NH)NH₂, C(O)(CH₂)_{q}NR¹⁸C(═NH)NH₂, and —C(O)(CH₂)₂NHC(O)(CH₂)₅NR¹⁸C(═NH)NH₂, wherein:

[0105] R¹⁸ is selected from H and C₁-C₆ alkyl; and

[0106] q is an integer from 1 to 5,

R¹⁶ is selected from an electron pair and H; and
each R¹⁷ is independently selected from H and methyl; and
a moiety of formula (III):

[chemical structure]

where:

[0107] R¹⁹ is selected from H, C₁-C₆ alkyl, C(═NH)NH₂, —C(O)(CH₂)ᵣNR²²C(═NH)NH₂, —C(O)CH(NH₂)(CH₂)₃NHC(═NH)NH₂, —C(O)(CH₂)₂NHC(O)(CH₂)₅NR²²C(═NH)NH₂, —C(O)CH(NH₂)(CH₂)₄NH₂ and G, where:

[0108] R²² is selected from H and C₁-C₆ alkyl; and

[0109] r is an integer from 1 to 5,

R²⁰ is selected from H and C₁-C₆ alkyl; and
R²¹ is selected from an electron pair and H;
R² is selected from H, G, acyl, trityl, 4-methoxytrityl, C₁-C₆ alkyl, —C(═NH)NH₂, —C(O)—R²³, —C(O)(CH₂)ₛNR²⁴C(═NH)NH₂, —C(O)(CH₂)₂NHC(O)(CH₂)₅NR²⁴C(═NH)NH₂, —C(O)CH(NH₂)(CH₂)₃NHC(═NH)NH₂, and a moiety of the formula:

[chemical structure]

where,

[0110] R²³ is of the formula —(O-alkyl) OH wherein v is an integer from 3 to 10 and each of the v alkyl groups is independently selected from C₂-C₆ alkyl; and

[0111] R²⁴ is selected from H and C₁-C₆ alkyl;

[0112] s is an integer from 1 to 5;

[0113] L is selected from —C(O)(CH₂)₆C(O)— and —C(O)(CH₂)₂S₂(CH₂)₂C(O)—; and

each R²⁵ is of the formula —(CH₂)₂OC(O)N(R²⁶)₂ where each R²⁶ is of the formula —(CH₂)₆NHC(═NH)NH₂; and
R³ is selected from an electron pair, H, and C₁-C₆ alkyl,

[0114] where G is a cell penetrating peptide (“CPP”) and linker moiety selected from —C(O)(CH₂)₅NH—CPP, —C(O)(CH₂)₂NH—CPP, —C(O)(CH₂)₂NHC(O)(CH₂)₅NH—CPP,

and —C(O)CH₂NH—CPP, or G is of the formula:

[chemical structure]

[0115] where the CPP is attached to the linker moiety by an amide bond at the CPP carboxy terminus, with the proviso that up to one instance of G is present, and

[0116] where the targeting sequence is complementary to 10 or more contiguous nucleotides in a target region comprising an exon of human dystrophin pre-mRNA; and

[0117] where, said subject has been administered a myostatin therapeutic to thereby suppress

[0118] one or both of myostatin activity or expression in the subject.

[0119] In various embodiments, each Nu is independently adenine, guanine, thymine, uracil, cytosine, inosine, hypoxanthine, 2,6-diaminopurine, 5-methyl cytosine, C5-propynyl-modified pyrimidines, or 10-(9-(aminoethoxy)phenoxazinyl).

[0120] In various embodiments, the targeting sequence comprises a sequence selected from SEQ ID NOS: 16-75, is a fragment of at least 10 contiguous nucleotides of a targeting sequence selected from SEQ ID NOS: 16-75, or is a variant having at least 90% sequence identity to a targeting sequence selected from SEQ ID NOS: 16-75.

[0121] In various embodiments,
[0122] i) Y is O, R² is selected from H or G, R³ is selected from an electron pair or H;
[0123] ii) R² is G where the CPP is of a sequence selected from SEQ ID NOS: 3486-3501;
[0124] iii) each R¹ is —N(CH₃)₂;
[0125] iv) at least one R¹ is selected from:

[chemical structure]

or
[0126] v) 50-90% of the R¹ groups are —N(CH₃)₂.

[0127] In various embodiments, T is of the formula:

[chemical structure]

[0128] where A is —N(CH₃)₂, and R⁶ is of the formula:

[chemical structure]

[0129] where R¹⁰ is —C(O)R¹¹OH.

[0130] In various embodiments, each Y is O, and T is selected from:

[chemical structure]

[0131] In various embodiments, T is of the formula:

[chemical structure]

[0132] Various aspects include, methods of treating Duchenne muscular dystrophy and related disorders in a subject having a mutation in the dystrophin gene that is amenable to treatment by an antisense oligomer capable of inducing exon skipping during processing of myostatin pre-mRNA. In various embodiments, the method comprises administering to a subject a compound comprising formula (VI):

[chemical structure]

or a pharmaceutically acceptable salt thereof, where:
[0133] each Nu is a nucleobase which taken together form a targeting sequence;
[0134] Z is an integer from 8 to 48;
[0135] each Y is independently selected from O and —NR⁴, wherein each R⁴ is independently selected from H, C₁-C₆ alkyl,

[0136] aralkyl, —C(═NH)NH₂, —C(O)(CH₂)—NR⁵C(═NH)NH₂, —C(O)(CH₂)₂NHC(O)(CH₂)₅NR⁵C(═NH)NH₂, and G, where R⁵ is selected from H and C₁-C₆ alkyl and n is an integer from 1 to 5;
[0137] T is selected from OH and a moiety of the formula:

[chemical structure]

[0138] where:
[0139] A is selected from —OH and —N(R⁷)₂R⁸, where:
   [0140] each R⁷ is independently selected from H and C₁-C₆ alkyl, and
   [0141] R⁸ is selected from an electron pair and H, and
[0142] R⁶ is selected from OH, —N(R⁹)CH₂C(O)NH₂, and a moiety of the formula:

[chemical structure]

[0143] where:
   [0144] R⁹ is selected from H and C₁-C₆ alkyl; and
   [0145] R¹⁰ is selected from G, —C(O)—R¹¹OH, acyl, trityl, 4-methoxytrityl, —C(═NH)NH₂, —C(O)(CH₂)ₘNR¹²C(═NH)NH₂, and —C(O)(CH₂)₂NHC(O)(CH₂)₅NR¹²C(═NH)NH₂, where:
      [0146] m is an integer from 1 to 5,
      [0147] R¹¹ is of the formula —(O-alkyl)_{y}- where y is an integer from 3 to 10 and
         [0148] each of the y alkyl groups is independently selected from C₂-C₆ alkyl; and

[0149] R¹² is selected from H and C₁-C₆ alkyl;

[0150] R² is selected from H, G, acyl, trityl, 4-methoxytrityl, C₁-C₆ alkyl, —C(═NH)NH₂, and —C(O)—R²³; and
[0151] R³ is selected from an electron pair, H, and C₁-C₆ alkyl, and where the targeting sequence comprises a sequence selected from SEQ ID NOS: 16-75, is selected from SEQ ID NOS: 16-75, is a fragment of at least 10 contiguous nucleotides of a sequence selected from SEQ ID NOS: 16-75, or is a variant having at least 90% sequence identity to a sequence selected from SEQ ID NOS: 16-75.

[0152] Various aspects include a dystrophin-related pharmaceutical composition, comprising an antisense oligomer compound of 20 to 50 subunits and a pharmaceutically acceptable carrier, the compound comprising: at least one subunit that is a nucleotide analog having (i) a modified internucleoside linkage, (ii) a modified sugar moiety, or (iii) a combination of the foregoing; and a targeting sequence complementary to 10 or more contiguous nucleotides in a target region comprising an exon of human dystrophin pre-mRNA;

[0153] together with a myostatin-related pharmaceutical composition, comprising an antisense oligomer compound of 12 to 40 subunits and a pharmaceutically acceptable carrier, the compound comprising: at least one subunit that is a nucleotide analog having (i) a modified internucleoside linkage, (ii) a modified sugar moiety, or (iii) a combination of the foregoing; and

[0154] a targeting sequence complementary to 12 or more contiguous nucleotides in a target region comprising an exon of human myostatin pre-mRNA. In various embodiments, the dystrophin-related composition and the myostatin-related composition are provided in the same pharmaceutical composition.

[0155] Various aspects include, methods for modulating myostatin expression in a subject having a genetic mutation amenable to treatment by an antisense oligomer capable of inducing exon skipping during processing of human myostatin pre-mRNA, the method comprising: administering to the subject an effective amount of an antisense oligomer comprising 12 to 40 subunits, and further comprising a targeting sequence complementary to 12 or more contiguous nucleotides comprising an exon of human myostatin pre-mRNA; and where, said oligomer comprises at least one subunit that is a nucleotide analog having (i) a modified internucleoside linkage, (ii) a modified sugar moiety, or (iii) a combination of the foregoing; binding the antisense oligomer to the target region in the myostatin pre-mRNA transcript; and, inhibiting transcription of the target region into a human myostatin mRNA transcript, where said subject has been administered a dystrophin therapeutic that increases dystrophin expression in the subject.

[0156] Various aspects include, methods for decreasing expression of exon 2 in a subject having a genetic mutation amenable to treatment by an antisense oligomer capable of inducing exon skipping during processing of human myostatin pre-mRNA, the method comprising: administering to the subject an effective amount of an antisense oligomer comprising 12 to 40 subunits, and further comprising a targeting sequence complementary to 12 or more contiguous nucleotides comprising an exon of human myostatin pre-mRNA and inhibiting transcription of exon 2 in a myostatin mRNA transcript, where said subject has been administered a dystrophin therapeutic that increases dystrophin expression in the subject. In various embodiments, exon 2 expression is decreased by about 5%, 6%, 7%, 8%, 9%, 10%, 11%, 12%, 13%, 14%, 15%, 16%, 17%, 18%, 19%, 20%, 25%, 30%, 35%, 40%, 45%, 50%, 55%, 60%, 65%, 70%, 75%, 80%, 85%, 90%, 95%, or 100% in a myostatin mRNA transcript.

[0157] Various aspects include, methods for decreasing the accumulation of functional myostatin protein in a muscle cell or tissue in a subject having a mutation in the dystrophin gene that is amenable to treatment by an antisense oligomer capable of inducing exon skipping during processing of human myostatin pre-mRNA, the method comprising: administering to the subject an effective amount of an antisense oligomer comprising 12 to 40 subunits, and further comprising a targeting sequence complementary to 12 or more contiguous nucleotides comprising an exon of human myostatin pre-mRNA, and inhibiting transcription of exon 2 in a myostatin mRNA transcript, where said subject has been administered a dystrophin therapeutic that increases dystrophin expression in the subject.

[0158] Various aspects include, a medicament for the treatment of Duchenne muscular dystrophy and related disorders comprising: an antisense oligomer compound comprising 12 to 40 subunits, comprising at least one subunit that is a nucleotide analog having (i) a modified internucleoside linkage, (ii) a modified sugar moiety, or (iii) a combination of the foregoing; and further comprising a targeting sequence complementary to 12 or more contiguous nucleotides comprising an exon of human myostatin pre mRNA; and a dystrophin therapeutic that increases dystrophin expression.

[0159] Various aspects include, methods for inhibiting the progression of Duchenne muscular dystrophy and related disorders in a subject having a mutation in the dystrophin gene that is amenable to treatment by an antisense oligomer capable of inducing exon skipping during processing of human myostatin pre-mRNA, the method comprising: administering to the subject an effective amount of an antisense oligomer comprising 12 to 40 subunits, and further comprising a targeting sequence complementary to 12 or more contiguous nucleotides comprising an exon of human myostatin pre-mRNA; and, inhibiting transcription of exon 2 in a myostatin mRNA transcript, where said subject has been administered a dystrophin therapeutic that increases dystrophin expression in the subject to thereby inhibit the progression of Duchenne muscular dystrophy.

[0160] Various aspects include, methods of decreasing the accumulation of a functional myostatin protein in a subject with Duchenne muscular dystrophy and related disorders, said method comprising: administering to the subject an effective amount of an antisense oligomer comprising 12 to 40 subunits, and further comprising a targeting sequence complementary to 12 or more contiguous nucleotides comprising an exon of human myostatin pre-mRNA; inhibiting transcription of exon 2 in a myostatin mRNA transcript, where the accumulation of functional myostatin protein in the subject is decreased, and where said subject has been administered a dystrophin therapeutic that increases dystrophin expression in the subject.

[0161] Various aspects include, methods for treating Duchenne muscular dystrophy and related disorders in a subject in need of such treatment, comprising: administering an antisense oligomer in an effective amount to result in a peak blood concentration of at least about 200-400 nM of antisense oligomer in the subject.

[0162] Various aspects include, a method of treating skeletal muscle mass deficiency in a subject having a mutation in the dystrophin gene that is amenable to treatment by an antisense oligomer capable of inducing exon skipping during processing of human myostatin pre-mRNA, the method comprising: (a) measuring blood or tissue levels of myostatin protein in the subject; (b) administering to the subject, an effective amount of an antisense oligomer comprising 12 to 40 subunits, and further comprising a targeting sequence complementary to 12 or more contiguous nucleotides comprising an exon of human myostatin pre-mRNA; (c) inhibiting transcription of exon 2 in a myostatin mRNA transcript; (d) measuring myostatin protein levels in the subject after a select time; and, (e) repeating said administering using the levels measured in (d) to adjust the dose or dosing schedule of the amount of antisense oligomer administered, wherein the level of myostatin protein is decreased in the subject after administering the antisense oligomer, and where said subject has been administered a dystrophin therapeutic that increases dystrophin expression in the subject.

[0163] Various aspects include, methods of inhibiting the progression of Duchenne muscular dystrophy and related disorders in a subject having a mutation in the dystrophin gene that is amenable to treatment by an antisense oligomer capable of inducing exon skipping during processing of dystrophin pre-mRNA, the method comprising: administering to the subject an effective amount of an antisense oligomer comprising 17 to 40 subunits, and further comprising a targeting sequence complementary to 12 or more contiguous nucleotides in a target region comprising an exon of human dystrophin pre-mRNA, wherein the antisense oligomer induces skipping of the exon; where, said oligomer comprises at least one subunit that is a nucleotide analog having (i) a modified internucleoside linkage, (ii) a modified sugar moiety, or (iii) a combination of the foregoing; and where, said subject has been administered a myostatin therapeutic that inhibits one or both of myostatin activity and expression in the subject to thereby inhibit the progression of Duchenne muscular dystrophy.

[0164] Various aspects include, methods of inhibiting the progression of Duchenne muscular dystrophy, the method comprising: administering to the subject an effective amount of an antisense oligomer comprising 12 to 40 subunits, and further comprising a targeting sequence complementary to 12 or more contiguous nucleotides comprising an exon of human myostatin pre-mRNA; and where, said oligomer comprises at least one subunit that is a nucleotide analog having (i) a modified internucleoside linkage, (ii) a modified sugar moiety, or (iii) a combination of the foregoing; and where said subject has been administered a dystrophin therapeutic that increases dystrophin expression in the subject to thereby inhibit the progression of Duchenne muscular dystrophy.

[0165] Various aspects and embodiments include antisense oligomers further comprising an arginine-rich peptide sequence conjugated to the 3′ terminal end or the 5′ terminal end of the antisense oligomer, where the arginine-rich peptide sequence comprises a sequence selected from SEQ ID NOS: 3486-3501.

[0166] Various aspects include, a composition comprising: an antisense oligomer comprising 17 to 40 subunits, and further comprising a targeting sequence complementary to 12 or more contiguous nucleotides in a target region comprising an exon of human dystrophin pre-mRNA; where said dystrophin-targeted oligomer comprises at least one subunit that is a nucleotide analog having (i) a modified internucleoside linkage, (ii) a modified sugar moiety, or (iii) a combination of the foregoing; and an antisense oligomer comprising 12 to 40 subunits, and further comprising a targeting sequence complementary to 12 or more contiguous nucleotides comprising an exon of human myostatin pre-mRNA; where said myostatin-targeted oligomer comprises at least one subunit that is a nucleotide analog having (i) a modified intemucleoside linkage, (ii) a modified sugar moiety, or (iii) a combination of the foregoing.

[0167] Various aspects and embodiments include administering a dystrophin therapeutic agent and a myostatin therapeutic agent to a subject where said subject is a pediatric patient of age 7 or greater.

[0168] Various aspects include methods for modulating dystrophin expression in a subject having a genetic mutation amenable to treatment by an antisense oligomer capable of inducing exon skipping during processing of human myostatin pre-mRNA, the methodcomprising: administering to the subject an effective amount of an antisense oligomer comprising 17 to 40 subunits, and further comprising a targeting sequence complementary to 12 or more contiguous nucleotides comprising an exon of human dystrophin pre-mRNA; and where, said oligomer comprises at least one subunit that is a nucleotide analog having (i) a modified intemucleoside linkage, (ii) a modified sugar moiety, or (iii) a combination of the foregoing; wherein said subject has been administered a myostatin therapeutic that inhibits one or both of myostatin activity and myostatin expression in the subject.

[0169] Various aspects and embodiments further include methods of modulating muscle mass in subjects with DMD and related disorders are provided.

[0170] In another aspect, the disclosure provides a method for treating a patient with DMD, the method comprising administering to the subject one or both of any dystrophin therapeutic described herein and any myostatin therapeutic described herein to thereby treat DMD. The patient can be one having a mutation in the DMD gene that is amenable to exon skipping, e.g., using an oligonucleotide capable of inducing exon skipping. In some embodiments, the patient has a mutation in the DMD gene that is amenable to exon 51 skipping. In some embodiments, the patient has a mutation in the DMD gene that is amenable to exon 53 skipping. In some embodiments, the patient has a mutation in the DMD gene that is amenable to exon 45 skipping. In some embodiments, the patient has a mutation in the DMD gene that is amenable to exon 44 skipping. In some embodiments, the patient has a mutation in the DMD gene that is amenable to exon 52 skipping. In some embodiments, the patient has a mutation in the DMD gene that is amenable to exon 50 skipping. In some embodiments, the patient has a mutation in the DMD gene that is amenable to exon 8 skipping. In some embodiments, the patient has a mutation in the DMD gene that is amenable to exon 55 skipping.

[0171] In another aspect, the disclosure provides a composition (e.g., a pharmaceutical composition) comprising any one or more of the dystrophin therapeutics described herein and one or more of the myostatin therapeutics described herein.

[0172] In some embodiments of the methods or compositions described herein, the dystrophin therapeutic is eteplirsen.

[0173] In some embodiments of the methods or compositions described herein, the dystrophin therapeutic does not comprise, and does not consist of, the sequence set forth in SEQ ID NO: 927.

[0174] In some embodiments of the methods or compositions described herein, dystrophin is human dystrophin. In some embodiments of the methods or compositions described herein, myostatin is human myostatin. In some embodiments of the methods or compositions described herein, the subject is human.

[0175] In some embodiments of any of the methods or compositions described herein, the subject is a human (e.g., a human patient). In some embodiments of any of the methods or compositions described herein, the subject is a male subject. In some embodiments of any of the methods or compositions described herein, the subject is a pediatric patient. In some embodiments of any of the methods or compositions described herein, the patient is seven years of age or older. In some embodiments of any of the methods or compositions described herein, the patient is at least seven years of age, but less than about 21 years of age.

[0176] In some embodiments of any of the methods or compositions described herein, one or both of the dystrophin therapeutic and the myostatin therapeutic are systemically delivered to the subject, e.g., by intravenous administration. In some embodiments of any of the methods or compositions described herein, the dystrophin therapeutic is systemically delivered to the subject. In some embodiments of any of the methods or compositions described herein, the myostatin therapeutic is systemically delivered to the subject.

[0177] In some embodiments of any of the methods or compositions described herein, one or both of the dystrophin therapeutic and the myostatin therapeutic are chronically administered to the subject. For example, in some embodiments of any of the methods or compositions described herein, one or both of the therapeutic agents can each, independently, be administered daily, weekly, monthly, bi weekly, or bi monthly. In some embodiments of any of the methods or compositions described herein, a therapeutically effective amount of one or both of the therapeutic agents can each, independently, can be delivered to the subject as a single dose (e.g., a single weekly dose) or as multiple doses (e.g., two or more, e.g., three, four, five, six, or seven doses) within a treatment period, e.g., once per week (weekly) or twice per week.

[0178] In some embodiments of any of the methods described herein, the dystrophin therapeutic is administered first in time and the myostatin therapeutic is administered second in time. For example, a dystrophin therapeutic (e.g., eteplirsen) can be administered first in time in an amount for a duration sufficient to increase dystrophin production in muscle cells of the subject, prior to administering the myostatin therapeuitic to the subject. Thus, in some embodiments, a dystrophin therapeutic (e.g., eteplirsen) is administered to a subject at about 30 mg per kg body weight of the subject once weekly for a period of time (e.g., 6 months, 1 year, 18 months, 2 years or more) to increase dystrophin expression in the muscle cells of the subject, prior to administering the myostatin therapeutic. In some embodiments, a dystrophin therapeutic (e.g., eteplirsen) is administered to a subject at about 30 to about 50 mg per kg body weight of the subject once weekly for a period of time (e.g., 6 months, 1 year, 18 months, 2 years or more) to increase dystrophin expression in the muscle cells of the subject, prior to administering the myostatin therapeutic. In some embodiments of any of the methods described herein, the myostatin therapeutic is administered first in time and the dystrophin therapeutic is administered second in time.

[0179] In some embodiments, the antisense oligonucleotide compounds for use in the compositions and methods described herein do not include a cell-penetrating peptide.

### BRIEF DESCRIPTION OF THE DRAWINGS

[0180] FIG. 1A illustrates a modified oligomer at the 5′ end to add a linker. FIGS. 1B and 1C illustrates an antisense oligonucleotide conjugated to a cell penetrating peptide (CPP). FIGS. 1D, 1E, 1F and 1G illustrate a repeating subunit segment of exemplary morpholino oligonucleotides.

[0181] FIG. 2A illustrates preparation of trityl piperazine phenyl carbamate. FIG. 2B illustrates preparation of a resin/reagent mixture.

[0182] FIG. 3A illustrates a gel electrophoresis of RT-PCR products of myostatin exon 2 skipping in human Rhabdomyosarcoma (RD) cells. FIG. 3B illustrates skipping efficiency of myostatin exon 2 in RD cells (%).

[0183] FIG. 4A illustrates a gel electrophoresis of RT-PCR products of myostatin exon 2 skipping in RD cells. FIG. 4B illustrates relative densitometric analysis of myostatin exon 2 skipping.

[0184] FIG. 5A illustrates myostatin exon 2 skipping in C2C12 and H2Kb^{mdx} cells. FIG. 5B illustrates densitometric analysis of RT-PCR products myostatin exon 2 skipping efficiency in C2C12 cells (%). FIG. 5C illustrates densitometric analysis of RT-PCR products myostatin exon 2 skipping efficiency in H2Kb^{mdx} cells (%).

[0185] FIG. 6A illustrates gel electrophoresis products of myostatin exon 2 skipping in tibialis anterior (TA) muscle. FIG. 6B illustrates muscle mass normalized to body weight. FIG. 6C illustrates densitometric analysis of RT-PCR products of myostatin exon 2 skipping.

[0186] FIG. 7A illustrates a gel electrophoresis of myostatin exon 2 skipping in mdx mice muscles. FIG. 7B illustrates densitometric analysis of RT-PCR products of myostatin exon 2 skipping in mdx mice. FIG. 7C illustrates muscle weight normalized to initial body weight in mdx mice. FIG. 7D illustrates muscle weight normalized to final body weight in mdx mice.

[0187] FIG. 8A illustrates increase in body weight in mdx mice administered 10 mg/kg BPMO. FIG. 8B illustrates increase in muscle mass in mdx mice administered 10 mg/kg BPMO. FIG. 8C illustrates increase in body weight in mdx mice administered 20 mg/kg BPMO.

[0188] FIG. 8D illustrates increase in muscle mass in mdx mice administered 20 mg/kg BPMO.

[0189] FIG. 9A illustrates grip strength test of mdx mice administered 10 mg/kg BPMO.

[0190] FIG. 9B illustrates grip strength test of mdx mice administered 20 mg/kg BPMO. FIG. 9C illustrates electrophysiology test in TA muscles in mdx mice administered 10 mg/kg BPMO.

[0191] FIG. 10A illustrates gel electrophoresis of RT-PCR products of myostatin exon 2 skipping in the diaphragm (DIA). FIG. 10B illustrates densitometric analysis of RT-PCR products of myostatin exon 2 skipping in the DIA. FIG. 10C illustrates gel electrophoresis of RT-PCR products of myostatin exon 2 skipping in the TA. FIG. 10D illustrates densitometric analysis of RT-PCR products of myostatin exon 2 skipping in the TA.

[0192] FIG. 11A illustrates body weight normalized to initial weight of young dystrophic miceC57BL10 administered saline (positive control), mdx mice administered saline (negative control), mdx mice administered BPMO-M23D (10 mg/kg), mdx mice administered BPMO-M23D (10 mg/kg) & BPMO-MSTN (10 mg/kg), or mdx mice administered BPMO-MSTN (10 mg/kg). Statistical analysis was by one-way ANOVA & Bonferroni post-hoc test comparing all groups at each week; error bars represent the S.E.M. FIG. 11B illustrates grip strength analysis of mouse forelimbs force in young dystrophic mice C57BL10 administered saline (positive control), mdx mice administered saline (negative control), mdx mice administered BPMO-M23D (10 mg/kg), mdx mice administered BPMO-M23D (10 mg/kg) & BPMO-MSTN (10 mg/kg), or mdx mice administered BPMO-MSTN (10 mg/kg).

[0193] FIG. 12A illustrates quantification of dystrophin RNA reframing by exon skipping.

[0194] FIG. 12B illustrates quantification of dystrophin protein expression by immunoblot. FIG. 12C illustrates quantification of myostatin exon 2 skipping.

[0195] FIG. 13A illustrates variance coefficient of the minimal Feret's diameter in the TA of young dystrophin mice. FIG. 13B illustrates percentage of centrally nucleated fibers in TA muscles of young dystrophin mice.

[0196] FIG. 14A illustrates increase in body weight in mdx mice. FIG. 14B illustrates increase in muscle mass in mdx mice administered BPMO-M23D or BPMO-M23D+BPMO-MSTN. FIG. 14C illustrates grip strength analysis of forelimb force in mdx mice administered BPMO-M23D or BPMO-M23D+BPMO-MSTN. FIG. 14D illustrates electrophysiology measurements in situ of mdx mice administered BPMO-M23D or BPMO-M23D+BPMO-MSTN.

[0197] FIG. 15A illustrates a gel electrophoresis showing dystrophin RNA reframing by exon skipping in muscles of mdx mice administered BPMO-M23D or BPMO-M23D+BPMO-MSTN. FIG. 15B illustrates relative densitometric analysis of RT-PCR products in mdx mice administered BPMO-M23D or BPMO-M23D+BPMO-MSTN.

[0198] FIG. 16A illustrates dystrophin protein expression in muscles harvested from mdx mice administered BPMO-M23D or BPMO-M23D+BPMO-MSTN. FIG. 16B illustrates relative densitometric quantification of dystrophin protein expression in muscles harvested from mdx mice administered BPMO-M23D or BPMO-M23D+BPMO-MSTN.

[0199] FIG. 17A illustrates a gel electrophoresis showing variable myostatin skipping in muscles of mdx mice administered BPMO-M23D or BPMO-M23D+BPMO-MSTN. FIG. 17B illustrates relative densitometric analysis of RT-PCR products of myostatin skipping in mdx mice administered BPMO-M23D or BPMO-M23D+BPMO-MSTN.

[0200] FIG. 18A illustrates gripstrength testing in mice 15 reads per mouse. FIG. 18B illustrates gripstength testing in mice 3 averages of 15 reads per mouse. FIG. 18C illustrates gripstrength testing in mice 3 highest reads per mouse.

### DETAILED DESCRIPTION

[0201] The following description is merely exemplary in nature and is not intended to limit the present invention, its applications, or its uses. It should be understood that throughout the drawings, corresponding reference numerals indicate like or corresponding parts and features. The description of specific examples indicated in various embodiments of the present invention are intended for purposes of illustration only and are not intended to limit the scope of the invention disclosed herein. Moreover, recitation of multiple embodiments having stated features is not intended to exclude other embodiments having additional features or other embodiments incorporating different combinations of the stated features.

[0202] Furthermore, the detailed description of various embodiments herein makes reference to the accompanying drawing FIGS, which show various embodiments by way of illustration. While the embodiments are described in sufficient detail to enable those skilled in the art to practice the invention, it should be understood that other embodiments may be realized and that logical and mechanical changes may be made without departing from the spirit and scope of the present invention. Thus, the detailed description herein is presented for purposes of illustration only and not of limitation. For example, steps or functions recited in descriptions, any method, system, or process, may be executed in any order and are not limited to the order presented. Moreover, any of the step or functions thereof may be outsourced to or performed by one or more third parties. Furthermore, any reference to singular includes plural embodiments, and any reference to more than one component may include a singular embodiment.

### I. DEFINITIONS

[0203] Unless defined otherwise, all technical and scientific terms used herein have the same meaning as commonly understood by those of ordinary skill in the art to which the disclosure belongs. Although any methods and materials similar or equivalent to those described herein can be used in the practice or testing of the subject matter of the present disclosure, preferred methods and materials are described. For the purposes of the present disclosure, the following terms are defined below.

[0204] The articles “a” and “an” are used herein to refer to one or to more than one (i.e., to at least one) of the grammatical object of the article. By way of example, “an element” means one element or more than one element.

[0205] The term “about” means a quantity, level, value, number, frequency, percentage, dimension, size, amount, weight or length that varies by as much as 30, 25, 20, 15, 10, 9, 8, 7, 6, 5, 4, 3, 2 or 1% to a reference quantity, level, value, number, frequency, percentage, dimension, size, amount, weight or length. When the term “about” is used in conjunction with a numerical range, it modifies that range by extending the boundaries above and below the numerical values set forth. In general, the term “about” is intended to modify a numerical value above and below the stated value by a variance of 10%.

[0206] Throughout this disclosure, unless the context requires otherwise, the words “comprise,” “comprises,” and “comprising” will be understood to imply the inclusion of a stated step or element or group of steps or elements but not the exclusion of any other step or element or group of steps or elements.

[0207] The term “consisting of” means including, and limited to, whatever follows the phrase “consisting of” Thus, the phrase “consisting of” indicates that the listed elements are required or mandatory, and that no other elements may be present. The term “consisting essentially of” means including any elements listed after the phrase, and limited to other elements that do not interfere with or contribute to the activity or action specified in the disclosure for the listed elements. Thus, the phrase “consisting essentially of” indicates that the listed elements are required or mandatory, but that other elements are optional and may or may not be present depending upon whether or not they materially affect the activity or action of the listed elements.

[0208] The terms “administering,” or “administer” include delivery of the therapeutic agent including modified antisense oligomers of the disclosure to a subject either by local or systemic administration. Administration may be topical (including ophthalmic and to mucous membranes including vaginal and rectal delivery), pulmonary, e.g., by inhalation or insufflation of powders or aerosols, including by nebulizer, intratracheal, intranasal, epidermal and transdermal), oral or parenteral. Parenteral administration includes intravenous, intraarterial, subcutaneous, intraperitoneal or intramuscular injection or infusion; or intracranial, e.g., intrathecal or intraventricular, administration.

[0209] “Co-administration” or “co-administering” or “combination therapy” as used herein, generally refers to the administration of a DMD exon-skipping antisense oligonucleotide in combination with one or more myostatin therapeutic compounds disclosed herein. In other words, the terms “co-administering” or “co-administration” or “combination therapy” mean the administration of the DMD exon-skipping antisense oligonucleotide, such as eteplirsen, concomitantly in a pharmaceutically acceptable dosage form with one or more myostatin therapeutic compounds and optionally one or more glucocorticoids disclosed herein: (i) in the same dosage form, e.g., the same tablet or pharmaceutical composition, meaning a pharmaceutical composition comprising a DMD exon-skipping antisense oligonucleotide, such as eteplirsen, one or more myostatin therapeutic compounds disclosed herein, and optionally one or more glucocorticoids and a pharmaceutically acceptable carrier; (ii) in a separate dosage form having the same mode of administration, e.g., a kit comprising a first pharmaceutical composition suitable for parenteral administration comprising a DMD exon-skipping antisense oligonucleotide, such as eteplirsen and a pharmaceutically acceptable carrier, a second pharmaceutical composition suitable for parenteral administration comprising one or more myostatin therapeutic compounds disclosed herein and a pharmaceutically acceptable carrier, and optionally a third pharmaceutical composition suitable for parenteral administration comprising one or more glucocorticoids disclosed herein and a pharmaceutically acceptable carrier; and (iii) in a separate dosage form having different modes of administration, e.g., a kit comprising a first pharmaceutical composition suitable for parenteral administration comprising a DMD exon-skipping antisense oligonucleotide, such as eteplirsen and a pharmaceutically acceptable carrier, a second pharmaceutical composition suitable for oral administration comprising one or more myostatin therapeutic compounds disclosed herein and a pharmaceutically acceptable carrier, and optionally a third pharmaceutical composition suitable for oral administration comprising one or more glucocorticoids disclosed herein and a pharmaceutically acceptable carrier.

[0210] Further, those of skill in the art given the benefit of the present disclosure will appreciate that when more than one myostatin therapeutic compound disclosed herein is being administered, the agents need not share the same mode of administration, e.g., a kit comprising a first pharmaceutical composition suitable for parenteral administration comprising a DMD exon-skipping antisense oligonucleotide, such as eteplirsen and a pharmaceutically acceptable carrier, a second pharmaceutical composition suitable for oral administration comprising a first myostatin therapeutic compound disclosed herein and a pharmaceutically acceptable carrier, and a third pharmaceutical composition suitable for parenteral administration comprising a second non-steroidal anti-inflammatory compound disclosed herein and a pharmaceutically acceptable carrier. Those of skill in the art will appreciate that the concomitant administration referred to above in the context of “co-administering” or “co-administration” means that the pharmaceutical composition comprising the DMD exon-skipping antisense oligonucleotide and a pharmaceutical composition(s) comprising the myostatin therapeutic compound can be administered on the same schedule, i.e., at the same time and day, or on a different schedule, i.e., on different, although not necessarily distinct, schedules.

[0211] In that regard, when the pharmaceutical composition comprising a DMD exon-skipping antisense oligonucleotide and a pharmaceutical composition(s) comprising the myostatin therapeutic compound is administered on a different schedule, such a different schedule may also be referred to herein as “background” or “background administration.” For example, the pharmaceutical composition comprising a DMD exon-skipping antisense oligonucleotide may be administered in a certain dosage form twice a day, and the pharmaceutical composition(s) comprising the myostatin therapeutic compound may be administered once a day, such that the pharmaceutical composition comprising the DMD exon-skipping antisense oligonucleotide may but not necessarily be administered at the same time as the pharmaceutical composition(s) comprising the myostatin therapeutic compound during one of the daily administrations. Of course, other suitable variations to “co-administering”, “co-administration” or “combination therapy” will be readily apparent to those of skill in the art given the benefit of the present disclosure and are part of the meaning of this term.

[0212] “Chronic administration,” as used herein, refers to continuous, regular, long-term therapeutic administration, i.e., periodic administration without substantial interruption. For example, daily, for a period of time of at least several weeks or months or years, for the purpose of treating muscular dystrophy in a patient. For example, weekly, for a period of time of at least several months or years, for the purpose of treating muscular dystrophy in a patient (e.g., weekly for at least six weeks, weekly for at least 12 weeks, weekly for at least 24 weeks, weekly for at least 48 weeks, weekly for at least 72 weeks, weekly for at least 96 weeks, weekly for at least 120 weeks, weekly for at least 144 weeks, weekly for at least 168 weeks, weekly for at least 180 weeks, weekly for at least 192 weeks, weekly for at least 216 weeks, or weekly for at least 240 weeks). In certain embodiments, the DMD exon skipping compound, such as eteplirsen, is chronically administered 30 mg/kg once weekly via an intravenous infusion in combination with a myostatin therapeutic compound disclosed herein.

[0213] The terms “contacting a cell,” “introducing” or “delivering” include delivery of the therapeutic agents of the disclosure into a cell by methods routine in the art, including, transfection (e.g., liposome, calcium-phosphate, polyethyleneimine), electroporation (e.g., nucleofection), microinjection).

[0214] The term “alkyl” refers to a linear (i.e., unbranched or acyclic), branched, cyclic, or polycyclic non aromatic hydrocarbon groups, which are optionally substituted with one or more functional groups. Unless otherwise specified, “alkyl” groups contain one to eight, and preferably one to six carbon atoms. C₁-C₆ alkyl, is intended to include at least C₁, C₂, C₃, C₄, C₅, and C₆ alkyl groups. Lower alkyl refers to alkyl groups containing 1 to 6 carbon atoms. Examples of alkyl include, but are not limited to, methyl, ethyl, n-propyl, isopropyl, cyclopropyl, butyl, isobutyl, sec-butyl, tert-butyl, cyclobutyl, pentyl, isopentyl tert-pentyl, cyclopentyl, hexyl, isohexyl, cyclohexyl, etc. Alkyl may be substituted or unsubstituted. Illustrative substituted alkyl groups include, but are not limited to, fluoromethyl, difluoromethyl, trifluoromethyl, 2-fluoroethyl, 3-fluoropropyl, hydroxymethyl, 2-hydroxyethyl, 3-hydroxypropyl, benzyl, substituted benzyl, phenethyl, substituted phenethyl, etc.

[0215] The term “alkoxy” refers to a subset of alkyl in which an alkyl group as defined above with the indicated number of carbons attached through an oxygen bridge. For example, “alkoxy” refers to groups —O-alkyl, where the alkyl group contains 1 to 8 carbons atoms of a linear, branched, cyclic configuration. Examples of “alkoxy” include, but are not limited to, methoxy, ethoxy, n-propoxy, i-propoxy, t-butoxy, n-butoxy, s-pentoxy and the like.

[0216] The term “aryl” used alone or as part of a larger moiety as in “aralkyl,”, “aralkoxy,” or “aryloxy-alkyl,” refers to aromatic ring groups having six to fourteen ring atoms, such as phenyl, 1-naphthyl, 2-naphthyl, 1-anthracyl and 2-anthracyl. An “aryl” ring may contain one or more substituents. The term “aryl” may be used interchangeably with the term “aryl ring.” “Aryl” also includes fused polycyclic aromatic ring systems in which an aromatic ring is fused to one or more rings. Non-limiting examples of useful aryl ring groups include phenyl, hydroxyphenyl, halophenyl, alkoxyphenyl, dialkoxyphenyl, trialkoxyphenyl, alkylenedioxyphenyl, naphthyl, phenanthryl, anthryl, phenanthro and the like, as well as 1-naphthyl, 2-naphthyl, 1-anthracyl and 2-anthracyl. Also included within the scope of the term “aryl,” as it is used herein, is a group in which an aromatic ring is fused to one or more non-aromatic rings, such as in an indanyl, phenanthridinyl, or tetrahydronaphthyl, where the radical or point of attachment is on the aromatic ring.

[0217] The term “acyl” refers to a C(O)R group (in which R signifies H, alkyl or aryl as defined above). Examples of acyl groups include formyl, acetyl, benzoyl, phenylacetyl and similar groups.

[0218] The term “homolog” refers to compounds differing regularly by the successive addition of the same chemical group. For example, a homolog of a compound may differ by the addition of one or more —CH2— groups, amino acid residues, nucleotides, or nucleotide analogs.

[0219] The terms “cell penetrating peptide” (CPP) or “a peptide moiety which enhances cellular uptake” are used interchangeably and refer to cationic cell penetrating peptides, also called “transport peptides,” “carrier peptides,” or “peptide transduction domains.” For example, a peptide-conjugated phosphoramidate or phosphorodiamidate morpholino (PPMO) may include a cell penetrating peptide or peptide moiety which enhances cellular uptake as described herein. In various embodiments, a peptide may be covalently bonded to the modified antisense oligomer. In further embodiments, a peptide may be conjugated to the 3′ end or the 5′ end of the modified antisense oligomer. In further embodiments, a peptide may be linked to a piperazinyl moiety or to a nitrogen atom of the 3′ terminal morpholino ring. In some embodiments, a cell penetrating peptide or peptide moiety which enhances cellular uptake may include an arginine-rich peptide as described herein. In a non-limiting example, modified antisense oligomers as disclosed herein can be coupled to an arginine-rich peptide such as (Arg)₆Gly (6 arginine and 1 glycine linked to an oligonucleotide).

[0220] The peptides, as shown herein, have the capability of inducing cell penetration within about or at least about 30%, 40%, 50%, 60%, 70%, 80%, 90%, or 100% of cells of a given cell culture population and allow macromolecular translocation within multiple tissues in vivo upon systemic administration. In some embodiments, the CPPs are of the formula [(C(O)CHR′NH)ₘ]R″ where R′ is a side chain of a naturally occurring amino acid or a one- or two-carbon homolog thereof, R″ is selected from Hydrogen or acyl, and m is an integer up to 50. Additional CPPs are well-known in the art and are disclosed, for example, in U.S. Published Application No. 20100016215, which is hereby incorporated by reference in its entirety. In other embodiments, m is an integer selected from 1 to 50 where, when m is 1, the moiety is a single amino acid or derivative thereof.

[0221] The term “amino acid” refers to a compound comprising a carbon atom to which are attached a primary amino group, a carboxylic acid group, a side chain, and a hydrogen atom. For example, the term “amino acid” includes, but is not limited to, Glycine, Alanine, Valine, Leucine, Isoleucine, Asparagine, Glutamine, Lysine, Aspartic Acid, Histidine, Methionine, Proline, Phenylalanine, Threonine, Tryptophan, Cysteine, Glutamic Acid, Serine, Tyrosine, Pyrolysine, Selenocystenine and Arginine. Additionally, as used herein, “amino acid” also includes derivatives of amino acids such as esters, and amides, and salts, as well as other derivatives, including derivatives having pharmaco properties upon metabolism to an active form. Accordingly, the term “amino acid” is understood to include naturally occurring and non-naturally occurring amino acids.

[0222] The term “an electron pair” refers to a valence pair of electrons that are not bonded or shared with other atoms.

[0223] The term “homology” refers to the amount or degree of similarity between two or more amino acid sequences or two or more nucleotide sequences. In some examples, sequence homology may include one or more conservative substitutions such that one or more substitutions would not affect the basic structure or function of a subject protein A conservative nucleotide substitution may include a substitution of one nucleic acid for another such that the substitution does not alter the amino acid encoded by the codon. A conservative amino acid substitution may include a substitution of one amino acid for another such that the substituted amino acid is of the same or similar class as the substituting amino acid, for example substitution of an aliphatic amino acid with another aliphatic amino acid. Homology may be determined using sequence comparison programs such as GAP (Deveraux et al., 1984, Nucleic Acids Research 12, 387-395). In this way sequences of a similar or substantially different length to those cited herein could be compared by insertion of gaps into the alignment, such gaps being determined, for example, by the comparison algorithm used by GAP.

[0224] The term “isolated” refers to a material that is substantially or essentially free from components that normally accompany it in its native state. For example, an “isolated oligonucleotide,” or “isolated oligomer” as used herein, may refer to an oligomer that has been purified or removed from the sequences that flank it in a naturally-occurring state, e.g., a DNA fragment that is removed from the sequences that are adjacent to the fragment in the genome. The term “isolating” as it relates to cells may refer to the purification of cells (e.g., fibroblasts, lymphoblasts) from a source subject (e.g., a subject with an oligonucleotide repeat disease). In the context of mRNA or protein, “isolating” may refer to the recovery of mRNA or protein from a source, e.g., cells.

[0225] The term “modulate” includes to “increase” or “decrease” one or more quantifiable parameters, optionally by a defined and/or statistically significant amount. By “increase” or “increasing,” “enhance” or “enhancing,” or “stimulate” or “stimulating,” refers generally to the ability of one or more modified antisense oligomer compounds or compositions, and/or one or more therapeutic agents to produce or cause a greater physiological response (e.g., downstream effects) in a cell or a subject relative to the response caused by either no antisense oligomer compound and/or therapeutic agent, or a control compound. Relevant physiological or cellular responses (in vivo or in vitro) will be apparent to persons skilled in the art, and may include a decrease in the inclusion of exon 2 (or an increase in the exclusion of exon 2) in myostatin mRNA, and/or a decrease in the expression of functional myostatin protein in a cell, or tissue, such as in a subject in need thereof. Other relevant physiological or cellular responses (in vivo or in vitro) may include a decrease in the inclusion of (or an increase in the exclusion of) one or more exons having a genetic mutation in dystrophin mRNA, and/or an increase in the expression of functional or semi-functional dystrophin protein in a cell, or tissue. A “decreased” or “reduced” amount is typically a “statistically significant” amount, and may include a decrease that is 1, 2, 3, 4, 5, 6, 7, 8, 9, 10, 15, 20, 30, 40, 50 or more times less (e.g., 100, 500, 1000 times), including all integers and decimal points in between and above 1 (e.g., 1.1, 1.2, 1.3, 1.4, 1.5, 1.6, 1.7, 1.8, 1.9), in comparison to the amount produced by a subject in need thereof in the absence of administration of a modified antisense oligomer compound and/or therapeutic (e.g. the “native” or “natural” rate of expression of a specific subject or cohort) or a control compound. The terms “reduce” or “inhibit” may relate generally to the ability of one or more antisense oligomer compounds or compositions, and/or one or more therapeutic to “decrease” a relevant physiological or cellular response, such as a symptom of a disease or condition described herein, as measured according to routine techniques in the diagnostic art. An “increased” or “enhanced” amount is typically a “statistically significant” amount, and may include an increase that is 1, 2, 3, 4, 5, 6, 7, 8, 9, 10, 15, 20, 30, 40, 50 or more times greater than (e.g., 100, 500, 1000 times), including all integers and decimal points in between and above 1 (e.g., 1.1, 1.2, 1.3, 1.4, 1.5, 1.6, 1.7, 1.8, 1.9), in comparison to the amount produced by a subject in need thereof in the absence of administration of a modified antisense oligomer compound and/or therapeutic (e.g. the “native” or “natural” rate of expression of a specific subject or cohort) or a control compound. The term “enhance” may relate generally to the ability of one or more modified antisense oligomer compounds or compositions, and/or one or more therapeutic to “increase” a relevant physiological or cellular response, such as a symptom of a disease or condition described herein, as measured according to routine techniques in the diagnostic art.

[0226] Relevant physiological or cellular responses (in vivo or in vitro) will be apparent to persons skilled in the art, and may include reductions in the symptoms or pathology of Duchenne muscular dystrophy (DMD) and related disorders, such as Becker muscular dystrophy (BMD), limb-girdle muscular dystrophy, congenital muscular dystrophy, facioscapulohumeral muscular dystrophy, myotonic muscular dystrophy, oculopharyngeal muscular dystrophy, distal muscular dystrophy, Emery-Dreifuss muscular dystrophy, muscle wasting conditions or disorders, such as AIDS, cancer or chemotherapy related muscle wasting, and fibrosis or fibrosis-related disorders (for example, skeletal muscle fibrosis). In other embodiments, methods of treating Duchenne muscular dystrophy and related disorders are provided, for example, where a reduction in symptoms or pathology may accompany or relate to an increase in the expression of functional dystrophin protein and/or a decrease in the expression of functional myostatin protein. An “increase” in a response may be “statistically significant” as compared to the response produced by a subject in need thereof in the absence of administration of a modified antisense oligomer compound and/or therapeutic (e.g. when compared to the “native” or “natural” rate of expression of a specific subject or cohort) or when compared to a control compound, and may include a 1%, 2%, 3%, 4%, 5%, 6%, 7%, 8%, 9%, 10%, 11%, 12%, 13%, 14%, 15%, 16%, 17%, 18%, 19%, 20%, 25%, 30%, 35%, 40%, 45%, 50%, 55%, 60%, 65%, 70%, 75%, 80%, 85%, 90%, 95%, or 100% increase, including all integers in between.

[0227] The term “therapeutic” or “therapeutic agent” as used herein means an agent capable of producing a therapeutic effect. In some embodiments, a therapeutic is, or comprises a polypeptide, a polypeptide analog, a nucleic acid, a nucleic acid analog, an aptamer, or a small molecule. “Polypeptide,” “peptide,” and “protein” are used interchangeably and mean any peptide-linked chain of amino acids, regardless of length or post-translational modification. A polypeptide can be wildtype proteins, functional fragments of a wildtype protein, or variants of a wildtype protein or fragment. Variants can comprise one or more amino acid substitutions, deletions, or insertions. The substitutions can be conservative or non-conservative. Conservative substitutions typically include substitutions within the following groups: glycine and alanine; valine, isoleucine, and leucine; aspartic acid and glutamic acid; asparagine, glutamine, serine and threonine; lysine, histidine and arginine; and phenylalanine and tyrosine. In some embodiments, a protein includes an antibody or a soluble receptor. In embodiments, a soluble receptor is ACVR2 (e.g., ACVR2B). In some embodiments, the nucleic acid is one that encodes a protein, such as dystrophin, microdystrophin, or minidystrophin. In embodiments, a nucleic acid is an antisense oligomer or a siRNA. In some embodiments, an antisense oligomer is a modified antisense oligomer as described herein.

[0228] As used herein, the term “antibody” refers to a whole antibody comprising two light chain polypeptides and two heavy chain polypeptides. Whole antibodies include different antibody isotypes including IgM, IgG, IgA, IgD, and IgE antibodies. The term “antibody” includes a polyclonal antibody, a monoclonal antibody, a chimerized or chimeric antibody, a humanized antibody, a primatized antibody, a deimmunized antibody, and a fully human antibody. The antibody can be made in or derived from any of a variety of species, e.g., mammals such as humans, non-human primates (e.g., orangutan, baboons, or chimpanzees), horses, cattle, pigs, sheep, goats, dogs, cats, rabbits, guinea pigs, gerbils, hamsters, rats, and mice. The antibody can be a purified or a recombinant antibody.

[0229] As used herein, the term “antibody fragment,” “antigen-binding fragment,” or similar terms refer to a fragment of an antibody that retains the ability to bind to a target antigen and inhibit the activity of the target antigen. Such fragments include, e.g., a single chain antibody, a single chain Fv fragment (scFv), an Fd fragment, an Fab fragment, an Fab′ fragment, or an F(ab′)2 fragment. A scFv fragment is a single polypeptide chain that includes both the heavy and light chain variable regions of the antibody from which the scFv is derived. In addition, intrabodies, minibodies, triabodies, and diabodies are also included in the definition of antibody and are compatible for use in the methods described herein. See, e.g., Todorovska et al. (2001) J Immunol Methods 248(1):47-66; Hudson and Kortt (1999) J Immunol Methods 231(1):177-189; Poljak (1994) Structure 2(12):1121-1123; Rondon and Marasco (1997) Annual Review of Microbiology 51:257-283, each of which are incorporated herein by reference in their entirety.

[0230] As used herein, the term “antibody fragment” also includes, e.g., single domain antibodies such as camelized single domain antibodies. See, e.g., Muyldermans et al. (2001) Trends Biochem Sci 26:230-235; Nuttall et al. (2000) Curr Pharm Biotech 1:253-263; Reichmann et al. (1999) J Immunol Meth 231:25-38; PCT application publication nos. WO 94/04678 and WO 94/25591; and U.S. Pat. No. 6,005,079, each of which are incorporated herein by reference in their entirety. In some embodiments, the disclosure provides single domain antibodies comprising two VH domains with modifications such that single domain antibodies are formed.

[0231] In some embodiments, an antigen-binding fragment includes the variable region of a heavy chain polypeptide and the variable region of a light chain polypeptide. In some embodiments, an antigen-binding fragment described herein comprises the CDRs of the light chain and heavy chain polypeptide of an antibody.

[0232] Myostatin, also referred to as growth differentiation factor 8 (GDF-8), belongs to the transforming growth factor-beta (TGF-β) superfamily. Myostatin is a protein encoded by the MSTN gene. The myostatin amino acid sequence is MQKLQLCVYIYLFMLIVAGPVDLNENSEQKENVEKEGLCNACTWRQNTKSSRIEAIKIQ ILSKLRLETAPNISKDVIRQLLPKAPPLRELIDQYDVQRDDSSDGSLEDDDYHATTETIIT MPTESDFLMQVDGKPKCCFFKFSSKIQYNKVVKAQLWIYLRPVETPTTVFVQILRLIKP MKDGTRYTGIRSLKLDMNPGTGIWQSIDVKTVLQNWLKQPESNLGIEIKALDENGHDL AVTFPGPGEDGLNPFLEVKVTDTPKRSRRDFGLDCDEHSTESRCCRYPLTVDFEAFGWD WIIAPKRYKANYCSGECEFVFLQKYPHTHLVHQANPRGSAGPCCTPTKMSPINMLYFNG KEQIIYGKIPAMVVDRCGCS (SEQ ID NO: 3502). The MSTN gene is largely expressed in human skeletal muscle and acts as a negative regulator of muscle growth. For example, in mice engineered to lack the myostatin gene demonstrate the development of twice the muscle mass of normal mice (McPherron et al., (1997), Nature 387:83-90).

[0233] In embodiments, a myostatin therapeutic is capable of suppressing one or both of myostatin activity and myostatin expression in a subject. A myostatin therapeutic may be a therapeutic that targets myostatin pre-mRNA and interferes with transcription of the myostatin pre-mRNA to mature mRNA. In embodiments, a myostatin therapeutic is capable of inducing exon skipping during the processing of human myostatin pre-mRNA. In embodiments, a myostatin therapeutic induces skipping of exon 2 in myostatin pre-mRNA and inhibits the expression of exon 2 containing myostatin pre-mRNA. A myostatin therapeutic may be a therapeutic that targets myostatin protein and interferes with the myostatin protein binding with the myostatin receptor. A myostatin therapeutic protein may be an anti-myostatin antibody, for example anti-GDF8 (Abcam, Cambridge Mass.), Domagrozumab (PF-06252616; Pfizer Inc.); Stamulumab (Cambridge Antibody Technology); PF-3446879 (Pfizer Inc.); Landogrozumab (LY-2495655; Eli Lilly); or Trevogrumab (REGN-103; Regeneron). In embodiments, a myostatin therapeutic may be a soluble receptor where the soluble receptor is ACVR2 (e.g., ACVR2B; MTAPWVALALLWGSLCAGSGRGEAETRECIYYNANWELERTNQSGLERCEGEQDKRL HCYASWRNSSGTIELVKKGCWLDDFNCYDRQECVATEENPQVYFCCCEGNFCNERFTH LPEAGGPEVTYEPPPTAPTLLTVLAYSLLPIGGLSLIVLLAFWMYRHRKPPYGHVDIHED PGPPPPSPLVGLKPLQLLEIKARGRFGCVWKAQLMNDFVAVKIFPLQDKQSWQSEREIFS TPGMKHENLLQFIAAEKRGSNLEVELWLITAFHDKGSLTDYLKGNIITWNELCHVAETM SRGLSYLHEDVPWCRGEGHKPSIAHRDFKSKNVLLKSDLTAVLADFGLAVRFEPGKPPG DTHGQVGTRRYMAPEVLEGAINFQRDAFLRIDMYAMGLVLWELVSRCKAADGPVDEY MLPFEEEIGQHPSLEELQEVVVHKKMRPTIKDHWLKHPGLAQLCVTIEECWDHDAEAR LSAGCVEERVSLIRRSVNGTTSDCLVSLVTSVTNVDLPPKESSI; SEQ ID NO: 3503). In some embodiments, the soluble receptor (e.g., ACVR2B) is conjugated to a heterologous moiety, e.g., a moiety that increases the circulatory half-life of the therapeutic in a subject. In some embodiments, the moiety is the Fc portion of an immunoglobulin (e.g., a human IgG Fc). In some embodiments, the moiety is a polyethylene glycol moiety. In some embodiments, the moiety comprises all or a portion of an albumin polypeptide (e.g., human albumin). In some embodiments, the myostatin therapeutic is a human ACVR2-Fc fusion, e.g., ramatercept (Acceleron). A myostatin therapeutic includes a nucleic acid where the nucleic acid is selected from an antisense oligomer and a siRNA. An antisense oligomer may be a modified myostatin antisense oligomer as described herein. In some embodiments, the myostatin therapeutic is a small molecule, such as OSX-200 (Ossianix Inc) or SRK-015 (Scholar Rock Inc.).

[0234] Antagonists of myostatin useful in the methods and compositions described herein include, e.g., agents that bind to directly to myostatin (GDF-8), such as anti-myostatin antibodies. Such antibodies are known in the art and described in, e.g., International Patent Application Publication No. WO2006116269 (Pfizer), U.S. Pat. No. 8,066,996 (Eli Lilly), U.S. Pat. No. 7,807,159 (Amgen), U.S. Pat. Nos. 6,096,506, and 6,468,535, the disclosures of each of which are incorporated herein by reference in their entirety. Myostatin antagonists also include soluble Activin receptor proteins, or fusion protein comprising soluble Activin proteins (e.g., ACVR2-Fc fusion proteins). Soluble Activin receptor proteins are described in, e.g., International Patent Application Publication No. WO 2010129406 (Johns Hopkins University), U.S. Patent Application Publication No. 20090005308 (Acceleron), International Patent Application Publication No. WO 2008/097541 (Acceleron), and International Patent Application Publication No. WO 2010019261 (Acceleron), the disclosures of each of which are incorporated herein by reference in their entirety. In some embodiments, the myostatin antagonist is a nucleic acid that inhibits expression of myostatin, such as short interfering nucleic acid (siNA), short interfering RNA (siRNA), double-stranded RNA (dsRNA), micro-RNA (miRNA), and short hairpin RNA (shRNA) molecules capable of mediating RNA interference (RNAi) against myostatin. Such molecules are described in, e.g., U.S. Patent Application Publication No. 20050124566 and U.S. Pat. No. 7,887,793, the disclosures of each of which are incorporated herein by reference in their entirety. In some embodiments, the nucleic acids inhibit the promoter of myostatin to thereby inhibit myostatin expression, as described in, e.g., U.S. Pat. No. 6,284,882 to Abbott Laboratories. Inhibitors of myostatin also include agents that inhibit myostatin signaling via its receptor, such as anti-ACVR2B antibodies (see, e.g., U.S. Patent Application Publication No. 20100272734 (Novartis) and International Patent Application Publication No. WO2014172448 (Anaptysbio)). Yet additional exemplary inhibitors of myostatin are described in International Patent Application Publication No. WO 2006/083183.

[0235] In some embodiments, a dystrophin therapeutic is administered first in time and the myostatin therapeutic is administered second in time. For example, the dystrophin therapeutic is administered for a time sufficient to promote, restore, and/or increase expression of functional dystrophin protein in muscle of the subject to which the therapeutic is administered. Subsequently, the myostatin therapeutic is administered to the subject for a time sufficient to, e.g., enhance muscle mass, strength, and/or elasticity in the subject. In embodiments, a dystrophin therapeutic is capable of increasing expression of dystrophin in a subject. A dystrophin therapeutic may increase the expression of dystrophin or a truncated form of dystrophin that is functional or semi-functional. A truncated form of dystrophin includes, but is not limited to, micro-dystrophin and mini-dystrophin (disclosed in EP Patent no. 2125006, which is hereby incorporated by reference in its entirety). A dystrophin therapeutic may be a therapeutic that targets dystrophin pre-mRNA and modulates the transcription of the dystrophin pre-mRNA to mature mRNA, for example, a modified antisense oligomer as described herein. In embodiments, a dystrophin therapeutic is capable of inducing exon skipping during processing of human dystrophin pre-mRNA. In embodiments, a targeted dystrophin pre-mRNA may have one or more genetic mutations. A dystrophin therapeutic induces exon skipping such that one or more exons containing one or more genetic mutations are removed from the dystrophin pre-mRNA during processing to mature mRNA. The resulting truncated mRNA may be translated into a functional or semi-functional dystrophin protein.

[0236] In some embodiments, the dystrophin therapeutic is or comprises a nucleic acid encoding a functional dystrophin protein, e.g., a microdystrophin or minidystrophin protein. In some embodiments, the nucleic acid is introduced into muscle cells of the subject by means of viral delivery. In some embodiments, expression of the functional dystrophin protein from the nucleic acid is driven by a muscle-specific promoter, such as the promoter for muscle creatine kinase (MCK). The use of viral vectors comprising a functional dystrophin protein for DMD gene therapy has been described in, e.g., Shin et al. (2013) Mol Ther 21(4):750-757; Rodino-Klapac et al. (2011) Methods Mol Biol 709:287-298; Okada et al. (2013) Pharmaceuticals 6(7):813-836; Rodino-Klapac et al. (2010) Mol Ther 18(1):109-117; Vincent et al. (1993) Nature Genetics 5:130-134; Xu et al. (2007) Neuromusc Disorders 17: 209-220; Martin et al. (2009) Am J Physiol Cell Physiol 296: 476-488; International Patent Application Publication No. WO 2009/088895, and U.S. Patent Application Publication Nos. 2010003218 and 20140323956, the disclosures of each of which are incorporated herein by reference in their entirety. One of skill in the art is also well aware of other vector systems that can be used to deliver a transgene to cells of interest, e.g., U.S. Pat. No. 5,707,618; Verhaart et al. (2012) Curr Opin Neurol 25(5):588-596; Odom et al. (2011) Mol Ther 19(1):36-45; and Koppanati et al. (2010) Gene Ther 17(11):1355-1362. Ongoing clinical studies evaluating transgenic delivery of functional dystrophin protein include, e.g., the studies having U.S. ClinicalTrials.gov identifiers: NCT02376816 (Nationwide Children's Hospital) and NCT00428935 (Nationwide Children's Hospital) as well as the trial described by Bowles et al. (2012) Mol Ther 20(2):443-455.

[0237] One of skill in the art is well aware that various mutations in the dystrophin gene are amenable to therapeutic exon skipping. For example, non-limiting examples of mutations in the following exons are amenable to exon 51 skipping include, e.g.: 45-50, 47-50, 48-50, 49-50, 50, 52, 52-63 (Leiden Duchenne muscular dystrophy mutation database, Leiden University Medical Center, The Netherlands). Determining whether a patient has a mutation in the DMD gene that is amenable to exon skipping is also well within the purview of one of skill in the art (see, e.g., Aartsma-Rus et al. (2009) Hum Mut 30:293-299 and Abbs et al. (2010) Neuromusc Disorders 20:422-427, the disclosures of each of which are incorporated herein by reference in their entirety).

[0238] Eteplirsen (see e.g., U.S. Pat. No. 7,807,816, incorporated herein by reference in its entirety) has been the subject of clinical studies to test its safety and efficacy, and clinical development is ongoing. Eteplirsen is a phosphorodiamidate mopholino (PMO) antisense oligonucleotide. In some embodiments, the dystrophin therapeutic is eteplirsen. “Eteplirsen”, also known as “AVN-4658” is a PMO having the base sequence 5′-CTCCAACATCAAGGAAGATGGCATTTCTAG-3′ (SEQ ID NO: 76). Eteplirsen is registered under CAS Registry Number 1173755-55-9. Chemical names include: RNA, [P-deoxy-P-(dimethyl amino)](2′,3′-dideoxy-2′,3′-imino-2′,3′-seco)(2′a→5′)(C-m5U-C-C-A-A-C-A-m5U-C-A-A-G-G-A-A-G-A-m5U-G-G-C-A-m5U-m5U-m5U-C-m5U-A-G) (SEQ ID NO: 263), 5′-[P[4-[[2-[2-(2-hydroxyethoxy)ethoxy]ethoxy]carbonyl]-1-piperazinyl]-N,N-dimethylphosphonamidate] and P,2′,3′-trideoxy-P-(dimethylamino)-5′-O-{P-[4-(10-hydroxy-2,5,8-trioxadecanoyl)piperazin-1-yl]-N,N-dimethylphosphonamidoyl}-2′,3′-imino-2′,3′-secocytidylyl-(2′a→5′)-P,3′-dideoxy-P-(dimethylamino)-2′,3′-imino-2′,3′-secothymidylyl-(2′a→5′)-P,2′,3′-trideoxy-P-(dimethylamino)-2′,3′-imino-2′,3′-secocytidylyl-(2′a→5)-P,2′,3′-trideoxy-P-(dimethylamino)-2′,3′-imino-2′,3′-secocytidylyl-(2′a→5′)-P,2′,3′-trideoxy-P-(dimethylamino)-2′,3′-imino-2′,3′-secoadenylyl-(2′a→5)-P,2′,3′-trideoxy-P-(dimethylamino)-2′,3′-imino-2′,3′-secoadenylyl-(2′a→5′)-P,2′,3′-trideoxy-P-(dimethylamino)-2′,3′-imino-2′,3′-secocytidylyl-(2′a→5′)-P,2′,3′-trideoxy-P-(dimethylamino)-2′,3′-imino-2′,3′-secoadenylyl-(2′a→5′)-P,3′-dideoxy-P-(dimethylamino)-2′,3′-imino-2′,3′-secothymidylyl-(2′a→5′)-P,2′,3′-trideoxy-P-(dimethylamino)-2′,3′-imino-2′,3′-secocytidylyl-(2′a→5′)-P,2′,3′-trideoxy-P-(dimethylamino)-2′,3′-imino-2′,3′-secoadenylyl-(2′a→5)-P,2′,3′-trideoxy-P-(dimethylamino)-2′,3′-imino-2′,3′-secoadenylyl-(2′a→5′)-P,2′,3′-trideoxy-P-(dimethylamino)-2′,3′-imino-2′,3′-secoguanylyl-(2′a→5′)-P,2′,3′-trideoxy-P-(dimethylamino)-2′,3′-imino-2′,3′-secoguanylyl-(2′a→5′)-P,2′,3′-trideoxy-P-(dimethylamino)-2′,3′-imino-2′,3′-secoadenylyl-(2′a→5′)-P,2′,3′-trideoxy-P-(dimethylamino)-2′,3′-imino-2′,3′-secoadenylyl-(2′a→5′)-P,2′,3′-trideoxy-P-(dimethylamino)-2′,3′-imino-2′,3′-secoguanylyl-(2′a→5)-P,2′,3′-trideoxy-P-(dimethylamino)-2′,3′-imino-2′,3′-secoadenylyl-(2′a→5′)-P,3′-dideoxy-P-(dimethylamino)-2′,3′-imino-2′,3′-secothymidylyl-(2′a→5′)-P,2′,3′-trideoxy-P-(dimethylamino)-2′,3′-imino-2′,3′-secoguanylyl-(2′a→5′)-P,2′,3′-trideoxy-P-(dimethylamino)-2′,3′-imino-2′,3′-secoguanylyl-(2′a→5′)-P,2′,3′-trideoxy-P-(dimethylamino)-2′,3′-imino-2′,3′-secocytidylyl-(2′a→5′)-P,2′,3′-trideoxy-P-(dimethylamino)-2′,3′-imino-2′,3′-secoadenylyl-(2′a→5′)-P,3′-dideoxy-P-(dimethylamino)-2′,3′-imino-2′,3′-secothymidylyl-(2′a→5′)-P,3′-dideoxy-P-(dimethylamino)-2′,3′-imino-2′,3′-secothymidylyl-(2′a→5′)-P,3′-dideoxy-P-(dimethylamino)-2′,3′-imino-2′,3′-secothymidylyl-(2′a→5′)-P,2′,3′-trideoxy-P-(dimethylamino)-2′,3′-imino-2′,3′-secocytidylyl-(2′a→5′)-P,3′-dideoxy-P-(dimethylamino)-2′,3′-imino-2′,3′-secothymidylyl-(2′a→5′)-P,2′,3′-trideoxy-P-(dimethylamino)-2′,3′-imino-2′,3′-secoadenylyl-(2′a→5′)-2′,3′-dideoxy-2′,3′-imino-2′,3′-secoguanosine.

[0239] Eteplirsen has the following structure:

[chemical structure]

[chemical structure]

[chemical structure]

[chemical structure]

[chemical structure]

[0240] “Dystrophin” is a rod-shaped cytoplasmic protein, and a vital part of the protein complex that connects the cytoskeleton of a muscle fiber to the surrounding extracellular matrix through the cell membrane, encoded by the dystrophin (i.e., DMD) gene. Dystrophin contains multiple functional domains. For instance, dystrophin contains an actin binding domain at about amino acids 14-240 and a central rod domain at about amino acids 253-3040. This large central domain is formed by 24 spectrin-like triple-helical elements of about 109 amino acids, which have homology to alpha-actinin and spectrin. The repeats are typically interrupted by four proline-rich non-repeat segments, also referred to as hinge regions. Repeats 15 and 16 are separated by an 18 amino acid stretch that appears to provide a major site for proteolytic cleavage of dystrophin. The sequence identity between most repeats ranges from 10-25%. One repeat contains three alpha-helices: 1, 2 and 3. Alpha-helices 1 and 3 are each formed by 7 helix turns, probably interacting as a coiled-coil through a hydrophobic interface. Alpha-helix 2 has a more complex structure and is formed by segments of four and three helix turns, separated by a Glycine or Proline residue. Each repeat is encoded by two exons, typically interrupted by an intron between amino acids 47 and 48 in the first part of alpha-helix 2. The other intron is found at different positions in the repeat, usually scattered over helix-3. Dystrophin also contains a cysteine-rich domain at about amino acids 3080-3360), including a cysteine-rich segment (i.e., 15 Cysteines in 280 amino acids) showing homology to the C-terminal domain of the slime mold (Dictyostelium discoideum) alpha-actinin. The carboxy-terminal domain is at about amino acids 3361-3685.

[0241] The amino-terminus of dystrophin binds to F-actin and the carboxy-terminus binds to the dystrophin-associated protein complex (DAPC) at the sarcolemma. The DAPC includes the dystroglycans, sarcoglycans, integrins and caveolin, and mutations in any of these components cause autosomally inherited muscular dystrophies. The DAPC is destabilized when dystrophin is absent, which results in diminished levels of the member proteins, and in turn leads to progressive fibre damage and membrane leakage. In various forms of muscular dystrophy, such as Duchenne's muscular dystrophy (DMD) and Becker's muscular dystrophy (BMD), muscle cells produce an altered and functionally defective form of dystrophin, or no dystrophin at all, mainly due to mutations in the gene sequence that lead to incorrect splicing. The predominant expression of the defective dystrophin protein, or the complete lack of dystrophin or a dystrophin-like protein, leads to rapid progression of muscle degeneration, as noted above. In this regard, a “defective” dystrophin protein may be characterized by the forms of dystrophin that are produced in certain subjects with DMD or BMD, as known in the art, or by the absence of detectable dystrophin.

[0242] The term “functional” in reference to a dystrophin protein includes those proteins derived from an mRNA transcript containing sequences corresponding to all of exons 1 to 79 of a dystrophin gene, also referred to as a wildtype protein. A functional dystrophin protein refers generally to a dystrophin protein having sufficient biological activity to reduce the progressive degradation of muscle tissue that is otherwise characteristic of Duchenne muscular dystrophy, typically as compared to the altered or “defective” form of dystrophin protein that is present in certain subjects with DMD or related disorders. A functional dystrophin protein may have about 10%, 20%, 30%, 40%, 50%, 60%, 70%, 80%, 90%, or 100% (including all integers in between) of the in vitro or in vivo biological activity of wildtype dystrophin, as measured according to routine techniques in the art. As one example, dystrophin-related activity in muscle cultures in vitro can be measured according to myotube size, myofibril organization (or disorganization), contractile activity, and spontaneous clustering of acetylcholine receptors (see, e.g., Brown et al., Journal of Cell Science. 112:209-216, 1999). Animal models are also valuable resources for studying the pathogenesis of disease, and provide a means to test dystrophin-related activity. Two of the most widely used animal models for DMD research are the mdx mouse and the golden retriever muscular dystrophy (GRMD) dog, both of which are dystrophin negative (see, e.g., Collins & Morgan, Int J Exp Pathol 84: 165-172, 2003). These and other animal models can be used to measure the functional activity of various dystrophin proteins. Included are truncated forms of dystrophin, such as those forms that are produced by certain of the antisense oligomer compounds of the present invention.

[0243] The term “functional” or “semi-functional” dystrophin protein includes those proteins derived from an mRNA transcript containing sequences corresponding to a truncated form of the transcript, for example, a dystrophin mRNA transcript having less than all of exons 1 to 79 of a dystrophin gene. In other words, a truncated form of a dystrophin mRNA may exclude one or more exons of a corresponding dystrophin gene. A truncated form of a dystrophin mRNA may express a truncated or shortened form of a dystrophin protein, also referred to as a microdystrophin protein.

[0244] The term “functional” in reference to a myostatin protein includes those proteins derived from an mRNA transcript containing all sequences corresponding to exon 1, exon 2 and exon 3 of a myostatin gene, also referred to as a wildtype protein.

[0245] A non-functional, dysfunctional or inactive myostatin protein includes a protein derived from a myostatin mRNA transcript missing all or any portion of the full gene corresponding to the sequence of exon 1, exon 2 and exon 3, or that contains all or a portion of the sequences corresponding to intron 1, intron 2, or other intron sequences, or where the non-functional state relates to missing functional elements as derived from a respective exon, or as otherwise derived from the inclusion of a respective intron, including partial or full sequences thereof. A non-functional, dysfunctional or inactive myostatin protein includes a protein derived from a myostatin mRNA transcript which excludes exon 2, for example, and/or having reduced functionality relative to the wildtype myostatin protein.

[0246] Thus, in various embodiments, the presence of, expression of, or increased expression of functional or semi-functional dystrophin protein may be determined, for example, by western blot analysis and dystrophin gene expression of, for example, DMD patient derived muscle cells treated with a modified antisense oligomer and/or a therapeutic of the present disclosure. In various embodiments, treatment of DMD muscle cells or a subject in need of treatment of DMD with a modified antisense oligomer and/or therapeutic of the disclosure may result in expression of functional dystrophin protein in an amount that is, for example, about 5%, 10%, 15%, 20%, 25%, 30%, 35%, 40%, 45%, 50%, 55%, 60%, 65%, 70%, 75%, 80%, 85%, 90%, 95%, or 100%, of the normal amount of dystrophin protein expressed in normal cells or a normal subject.

[0247] In various embodiments, the functionality of dystrophin or truncated dystrophin protein expressed by a tissue or a subject in need of treatment of DMD may be determined by immunohistochemical analysis of, for example, the number of muscle fibers, the increase in muscle mass, the percent of muscle fiber with centralized nuclei, and the amount of functional dystrophin protein as compared to untreated equivalents. The functionality of dystrophin or truncated dystrophin protein of a subject in need of treatment of DMD may be further analyzed by physical and physiological tests such as motor function tests including measurements of muscle mass and grip strength.

[0248] In some embodiments, the dystrophin therapeutic restores dystrophin expression in cells of interest. The term “restoration” of dystrophin synthesis or production refers generally to the production of a dystrophin protein including truncated forms of dystrophin in a patient with muscular dystrophy following treatment with eteplirsen as described herein. In some embodiments, treatment results in an increase in novel dystrophin production in a patient by 1%, 5%, 10%, 20%, 30%, 40%, 50%, 60%, 70%, 80%, 90% or 100% (including all integers in between). In some embodiments, treatment increases the number of dystrophin-positive fibers to at least 20%, about 30%, about 40%, about 50%, about 60%, about 70%, about 80%, about 90% or about 95% to 100% of normal in the subject. In other embodiments, treatment increases the number of dystrophin-positive fibers to about 20% to about 60%, or about 30% to about 50% of normal in the subject. The percent of dystrophin-positive fibers in a patient following treatment can be determined by a muscle biopsy using known techniques. For example, a muscle biopsy may be taken from a suitable muscle, such as the biceps brachii muscle in a patient.

[0249] Analysis of the percentage of positive dystrophin fibers may be performed pre-treatment and/or post-treatment or at time points throughout the course of treatment. In some embodiments, a post-treatment biopsy is taken from the contralateral muscle from the pre-treatment biopsy. Pre- and post-treatment dystrophin expression studies may be performed using any suitable assay for dystrophin. In one embodiment, immunohistochemical detection is performed on tissue sections from the muscle biopsy using an antibody that is a marker for dystrophin, such as a monoclonal or a polyclonal antibody. For example, the MANDYS106 antibody can be used which is a highly sensitive marker for dystrophin. Any suitable secondary antibody may be used.

[0250] In some embodiments, the percent dystrophin-positive fibers are calculated by dividing the number of positive fibers by the total fibers counted. Normal muscle samples have 100% dystrophin-positive fibers. Therefore, the percent dystrophin-positive fibers can be expressed as a percentage of normal. To control for the presence of trace levels of dystrophin in the pretreatment muscle as well as revertant fibers a baseline can be set using sections of pre-treatment muscles from each patient when counting dystrophin-positive fibers in post-treatment muscles. This may be used as a threshold for counting dystrophin-positive fibers in sections of post-treatment muscle in that patient. In other embodiments, antibody-stained tissue sections can also be used for dystrophin quantification using Bioquant image analysis software (Bioquant Image Analysis Corporation, Nashville, Tenn.). The total dystrophin fluorescence signal intensity can be reported as a percentage of normal. In addition, Western blot analysis with monoclonal or polyclonal anti-dystrophin antibodies can be used to determine the percentage of dystrophin positive fibers. For example, the anti dystrophin antibody NCL-Dysl from Novacastra may be used. Dystrophin production can also be measured by reverse-transcription polymerase chain reaction (RT-PCR). Primers can be designed to measure dystrophin genes that will produce a functional dystrophin protein. The percentage of dystrophin-positive fibers can also be analyzed by determining the expression of the components of the sarcoglycan complex (□□□) and/or neuronal NOS.

[0251] In some embodiments, treatment slows or reduces the progressive respiratory muscle dysfunction and/or failure in patients with DMD that would be expected without treatment. In some embodiments, treatment stabilizes respiratory muscle function in patients with DMD. In one embodiment, treatment with eteplirsen may reduce or eliminate the need for ventilation assistance that would be expected without treatment. In one embodiment, measurements of respiratory function for tracking the course of the disease, as well as the evaluation of potential therapeutic interventions include Maximum inspiratory pressure (MIP), maximum expiratory pressure (MEP) and forced vital capacity (FVC). MIP and MEP measure the level of pressure a person can generate during inhalation and exhalation, respectively, and are sensitive measures of respiratory muscle strength. MIP is a measure of diaphragm muscle weakness.

[0252] In some embodiments, treatment may stabilize, maintain, improve or increase walking ability (e.g., stabilization of ambulation) in the subject. In some embodiments, treatment maintains, increases, or reduces loss of a stable walking distance in a patient, as measured by, for example, the 6 Minute Walk Test (6MWT), described by McDonald, et al. (Muscle Nerve, 2010; 42:966-74; Muscle Nerve, 2010; 41:500-10, the contents of which are herein incorporated by reference in its entirety). The 6MWT is a clinically meaningful endpoint focused on ambulation that characterizes changes in walking function over time as an expression of changes in disease state.

[0253] A change in the 6 Minute Walk Distance (6MWD) may be expressed as an absolute value, a percentage change or a change in the %-predicted value. The performance of a DMD patient in the 6MWT relative to the typical performance of a healthy peer can be determined by calculating a %-predicted value. For example, the %-predicted 6MWD may be calculated using the following equation for males: 196.72+(39.81×age)−(1.36×age2)+(132.28×height in meters). For females, the %-predicted 6MWD may be calculated using the following equation: 188.61+(51.50×age)−(1.86×age2)+(86.10×height in meters) (Henricson et al. PLoS Curr., 2012, version 2, the contents of which are herein incorporated by reference in its entirety).

[0254] Ambulation can be measured through various methods, including the North Star Ambulatory Assessment (NSAA). The NSAA was developed by the Physiotherapy Assessment and Evaluation Group of the North Start Clinical Network to assess ambulant boys with DMD, and provides a list of activities that are scored from 2-0, with 2 being normal and 0 being “unable to achieve independently” (2006-2011 MDC/North Star Clinical Network). These activities range from standing for a minimum of 3 seconds to climbing up and down a box to running. In certain embodiments, treatment with eteplirsen may maintain, stabilize, increase, or improve ambulation, for example, as determined by the NSAA.

[0255] In the present case, therapeutic agents, including modified antisense oligomers are used to induce a decrease in myostatin mRNA containing exon 2, resulting in an amelioration of Duchenne muscular dystrophy symptoms (e.g. reduction of functional myostatin protein) in the range of about 30% to about 100% or the percentages disclosed above with regard to functionality, as compared to non-treatment. Such amelioration of symptoms may be observed on a micro level (e.g. reduction of myostatin protein expression measured by, for example, immunohistochemistry, immunofluorescence, western-blot analyses; increase of muscle growth; restoration of muscle function) and physiological level (e.g. improvement of motor function assessed by physical examination).

[0256] Modified antisense oligomers are used to induce exon skipping during the processing of dystrophin pre-mRNA where the dystrophin pre-mRNA includes exons having one or more genetic mutations, or in which one or more regions of the dystrophin gene have been deleted, resulting in an amelioration of symptoms related to Duchenne muscular dystrophy and related disorders (e.g. restoration of functional or semi-functional dystrophin protein). Functional or semi-functional dystrophin protein may be increased in the range of about 30% to about 100% or the percentages disclosed above with regard to functionality, as compared to non-treatment. Such amelioration of symptoms may be observed on a micro level (e.g. increase of dystrophin protein expression measured by, for example, immunohistochemistry, immunofluorescence, western-blot analyses; increase of muscle growth; restoration of muscle function) and physiological level (e.g. improvement of motor function assessed by physical examination).

[0257] The term “nucleotide” refers to a naturally occurring nucleotide comprising a nucleobase, a sugar and at least one phosphate group (e.g., a phosphodiester linking group).

[0258] The term “nucleotide analog” refers to a derivative of, or modification to, a naturally occurring nucleotide, for example, a nucleotide comprising at least one modification. Such modifications may include at least one of (i) a modified internucleoside linkage, (ii) a modified sugar moiety, or (iii) a combination of the foregoing. The skilled practitioner will appreciate that where a modification is specified with respect to any one component of a nucleotide subunit (e.g., a modified sugar), the unspecified portion(s) of the nucleotide subunit may remain unmodified (e.g., an unmodified internucleoside linkage, an unmodified nucleobase).

[0259] The terms “oligonucleotide,” “oligomer,” “oligo,” “antisense oligonucleotide,” “antisense oligomer,” “modified antisense oligomer” and “antisense oligo,” and other appropriate combinations and derivations thereof, refer to linear sequences of nucleotides, or nucleotide analogs, where one or more nucleobases may hybridize to a portion of a target RNA against which the oligomer is directed, referred to as a target sequence, by Watson-Crick base pairing, to form an oligomer:RNA heteroduplex within the target sequence. Specifically, the terms “antisense,” “oligonucleotide,” “oligomer,” “oligo” and “compound” may be used in various combinations and interchangeably to refer to such an oligomer. Cyclic subunits comprising portions of the nucleotides may be based on ribose or another pentose sugar, sugar analog or, in certain embodiments may be a modified sugar, for example, a morpholino group (see description of morpholino-based oligomers below).

[0260] The term “modified,” “non-naturally-occurring,” or “analogs,” and other appropriate combinations and derivatives thereof, when referring to oligomers, refer to oligomers having one or more nucleotide subunits having at least one modification selected from (i) a modified internucleoside linkage, e.g., an internucleoside linkage other than the standard phosphodiester linkage found in naturally-occurring oligonucleotides, (ii) modified sugar moieties, e.g., moieties other than ribose or deoxyribose moieties found in naturally occurring oligonucleotides, or (iii) a combination of the foregoing. In various embodiments, a modified internucleoside linkage is selected from a phosphorothioate internucleoside linkage, a phosphoramidate internucleoside linkage, a phosphorodiamidate internucleoside linkage, and a phosphorotriamidate internucleoside linkage. In further embodiments, the phosphorodiamidate internucleoside linkage comprises a phosphorous atom that is covalently bonded to a (1,4-piperazin)-1-yl moiety, a substituted (1,4-piperazin)-1-yl moiety, a 4-aminopiperidin-1-yl moiety, or a substituted 4-aminopiperidin-1-yl moiety. In various embodiments, the modified sugar moiety is selected from a peptide nucleic acid (PNA) subunit, a locked nucleic acid (LNA) subunit, a 2′O,4′C-ethylene-bridged nucleic acid (ENA) subunit, a tricyclo-DNA (tc-DNA) subunit, a 2′ O-methyl subunit, a 2′ O-methoxyethyl subunit, a 2′-fluoro subunit, a 2′-O-[2-(N-methylcarbamoyl)ethyl]subunit, and a morpholino subunit.

[0261] A modification to the internucleoside linkage may be between at least two sugar and/or modified sugar moieties of an oligomer. Nucleotide analogs support bases capable of hydrogen bonding by Watson-Crick base pairing to naturally occurring oligonucleotide bases, where the analog presents the bases in a manner to permit such hydrogen bonding in a sequence-specific fashion between the oligomer analog molecule and bases in the naturally occurring oligonucleotide (e.g., single-stranded RNA or single-stranded DNA). Exemplary analogs are those having a substantially uncharged, phosphorus containing internucleoside linkages.

[0262] A “nuclease-resistant” oligomer refers to one whose internucleoside linkage is substantially resistant to nuclease cleavage, in non-hybridized or hybridized form; by common extracellular and intracellular nucleases in the body (for example, by exonucleases such as 3′-exonucleases, endonucleases, RNase H); that is, the oligomer shows little or no nuclease cleavage under normal nuclease conditions in the body to which the oligomer is exposed. A “nuclease-resistant heteroduplex” refers to a heteroduplex formed by the binding of a modified antisense oligomer to its complementary target, such that the heteroduplex is substantially resistant to in vivo degradation by intracellular and extracellular nucleases, which are capable of cutting double-stranded RNA/RNA or RNA/DNA complexes. A “heteroduplex” refers to a duplex between a modified antisense oligomer and the complementary portion of a target RNA. For example, a nuclease-resistant oligomer may be a modified antisense oligomer as described herein.

[0263] The terms “nucleobase” (Nu), “base pairing moiety” or “base” are used interchangeably to refer to a purine or pyrimidine base found in naturally occurring, or “native” DNA or RNA (e.g., uracil, thymine, adenine, cytosine, and guanine), as well as analogs of these naturally occurring purines and pyrimidines, that may confer improved properties, such as binding affinity to the oligomer. Exemplary analogs include hypoxanthine (the base component of the nucleoside inosine); 2, 6-diaminopurine; 5-methyl cytosine; C5-propynyl-modified pyrimidines; 10-(9-(aminoethoxy)phenoxazinyl) (G-clamp) and the like.

[0264] Further examples of base pairing moieties include, but are not limited to, uracil, thymine, adenine, cytosine, guanine and hypoxanthine (inosine) having their respective amino groups protected by acyl protecting groups, 2-fluorouracil, 2-fluorocytosine, 5-bromouracil, 5-iodouracil, 2,6-diaminopurine, azacytosine, pyrimidine analogs such as pseudoisocytosine and pseudouracil and other modified nucleobases such as 8-substituted purines, xanthine, or hypoxanthine (the latter two being the natural degradation products). The modified nucleobases disclosed in Chiu and Rana, R N A, 2003, 9, 1034-1048, Limbach et al. Nucleic Acids Research, 1994, 22, 2183-2196 and Revankar and Rao, Comprehensive Natural Products Chemistry, 1999, vol. 7, 313, are also contemplated, the contents of which are incorporated herein by reference.

[0265] Further examples of base pairing moieties include, but are not limited to, expanded-size nucleobases in which one or more benzene rings has been added. Nucleic base replacements are described in the following examples: the Glen Research catalog (www.glenresearch.com); Krueger A T et al., Acc. Chem. Res., 2007, 40, 141-150; Kool, E T, Acc. Chem. Res., 2002, 35, 936-943; Benner S. A., et al., Nat. Rev. Genet., 2005, 6, 553-543; Romesberg, F. E., et al., Curr. Opin. Chem. Biol., 2003, 7, 723-733; Hirao, I., Curr. Opin. Chem. Biol., 2006, 10, 622-627, the contents of each example are incorporated herein by reference. These are contemplated as useful for the synthesis of various oligomers described herein. Examples of expanded-size nucleobases are shown below:

[chemical structure]

[0266] A nucleobase covalently linked to a ribose, sugar analog, modified sugar or morpholino comprises a nucleoside. “Nucleotides” comprise a nucleoside together with at least one linking phosphate group. The phosphate groups comprise covalent linkages to adjacent nucleosides form an oligomer. Thus, the phosphate group of the nucleotide is commonly referred to as forming an “internucleoside linkage.” Accordingly, a nucleotide comprises a nucleoside as further described herein and an internucleoside linkage. In some embodiments, a modified antisense oligomer of the disclosure comprises subunits wherein a “subunit” includes naturally occurring nucleotides, nucleotide analogs as described herein, and combinations thereof. In certain embodiments, a modified antisense oligomer of the disclosure comprises subunits wherein at least one subunit is a nucleotide analog.

[0267] The terms “sequence identity,” “sequence homology,” and “complementarity” (e.g. a “sequence 50% identical to,” a “sequence 50% homologous to,” and “a sequence 50% complementary to”) in the context of nucleic acids refer to the extent that a sequence is identical on a nucleotide-by-nucleotide basis over a window of comparison. A “percentage identity,” “percentage homology,” and “percentage complementary to” may be calculated by comparing two optimally aligned sequences over the window of comparison, determining the number of positions at which the identical nucleic acid base (e.g., A, T, C, G, I) occurs in both sequences to yield the number of matched positions, dividing the number of matched positions by the total number of positions in the window of comparison (i.e., the window size), and multiplying the result by 100 to yield the percentage of sequence identity. Optimal alignment of sequences for aligning a comparison window may be conducted by computerized implementations of algorithms (GAP, BESTFIT, FASTA, and TFASTA in the Wisconsin Genetics Software Package Release 7.0, Genetics Computer Group, 575 Science Drive Madison, Wis., USA) or by inspection and the best alignment (i.e., resulting in the highest percentage homology over the comparison window) generated by any of the various methods selected. Reference also may be made to the BLAST family of programs as for example disclosed by Altschul et al., Nucl. Acids Res. 25:3389, 1997. In various embodiments, a modified antisense oligomer of the disclosure may have at least 70%, 75%, 80%, 85%, 90%, 95%, 99% or 100% sequence identity with a targeting sequence in Table 1 (SEQ ID NOS: 1 to 3) and Table 2 (SEQ ID NOS: 4-15).

[0268] As used herein, a targeting sequence of an oligomer “specifically hybridizes” to a target region of an oligonucleotide if the oligomer hybridizes to the target region under physiological conditions, with a melting point (Tm) substantially greater than 40° C., 45° C., 50° C., and in various embodiments, 60° C.−80° C. or higher. Such hybridization preferably corresponds to stringent hybridization conditions. At a given ionic strength and pH, the Tm is the temperature at which 50% of a targeting sequence hybridizes to a complementary sequence in a target region. Such hybridization may occur with “near” or “substantial” complementarity of the modified antisense oligomer to the target region, as well as with exact complementarity. In some embodiments, an oligomer may hybridize to a target region at about 50%, 55%, 60%, 65%, 70%, 75%, 80%, 85%, 90%, 95%, 99% or 100%.

[0269] As used herein, the term “subunit” refers to a naturally occurring nucleotide or a naturally occurring nucleotide comprising at least one modification. A modification may comprise at least one of (i) a modified internucleoside linkage, (ii) a modified sugar moiety, or (iii) a combination of the foregoing. In further embodiments, a modification may include a modified nucleobase.

[0270] As used herein, the term “sufficient length” refers to a modified antisense oligomer that is complementary to at least 20 to 50 contiguous nucleobases in a target region within a pre-mRNA, where such complementarity may be completely internal to a target region within an exon or may span a splice junction across an intron/exon or exon/intron region. In embodiments, sufficient length may refer to a modified antisense oligomer that is complementary to at least 12, contiguous nucleobases in a target region within a pre-mRNA, where such complementarity may be completely internal to a target region within an exon or may span a splice junction across an intron/exon or exon/intron region.

[0271] A modified myostatin antisense oligomer may, for example, be complementary to intron 1/exon 2, exon 2 or exon 2/intron 2 of myostatin pre-mRNA. In various embodiments, the modified myostatin antisense oligomer comprises at least a number of nucleotides to be capable of specifically hybridizing to a target region of a myostatin pre-mRNA sequence. Preferably an oligomer of sufficient length is from 12 to 40 nucleotides, 12 to 30 nucleotides, 12 to 15 nucleotides, 12 to 20 nucleotides, 15 to 20 nucleotides, 15 to 22 nucleotides, 12 to 22 nucleotides in length, including all integers in between these ranges. In some embodiments, the myostatin antisense oligomer is about 12 to about 40 or about 12 to about 30 bases in length. In some embodiments, the antisense oligomer is about 12 to about 25, about 15 to about 25, or about 15 to about 20 bases in length. In some embodiments, a myostatin antisense oligomer sequence comprises at least about 12, 13, 14, 15, 16, 17, 18, 19, 20, 21, 22, 23, 24, 25, 26, 27, 28, 29, 30, 31, 32, 33, 34, 35, 36, 37, 38, 39, or 40 contiguous or non-contiguous bases that are complementary to the target sequences of Table 1 (e.g., SEQ ID NO: 1, SEQ ID NO: 2 or SEQ ID NO: 3, or sequences that span at least a portion of SEQ ID NO: X, SEQ ID NO: Y or SEQ ID NO: Z).

[0272] A modified dystrophin antisense oligomer may be complementary to a target region completely internal to exon 7, exon 8, exon 9, exon 19, exon 23, exon 44, exon 45, exon 50, exon 51, exon 52, exon 53 or exon 55. In various embodiments, the modified dystrophin antisense oligomer comprises at least a number of nucleotides to be capable of specifically hybridizing to a target region of a dystrophin pre-mRNA sequence. Preferably an oligomer of sufficient length is from 17 to 50 nucleotides, 17 to 40 nucleotides, 14 to 25 nucleotides, 15 to 30 nucleotides, 17 to 30 nucleotides, 17 to 27 nucleotides, 10 to 27 nucleotides, 10 to 25 nucleotides, or 10 to 20 nucleotides in length, including all integers in between these ranges. In some embodiments, the antisense oligomer is about 17 to about 40 or about 10 to about 30 bases in length. In some embodiments, the antisense oligomer is about 14 to about 25 or about 17 to about 27 bases in length. In some embodiments, an antisense oligomer sequence comprises at least about 10, 11, 12, 13, 14, 15, 16, 17, 18, 19, 20, 21, 22, 23, 24, 25, 26, 27, 28, 29, 30, 31, 32, 33, 34, 35, 36, 37, 38, 39, or 40 contiguous or non-contiguous bases that are complementary to the target sequences of Table 2 (e.g., SEQ ID NOS: 4-15).

[0273] As used herein, the term a “subject” or a “subject in need thereof” includes a mammalian subject such as a human subject. Exemplary mammalian subjects have or are at risk for having Duchenne muscular dystrophy and related disorders. As used herein, the term “muscular dystrophy,” “Duchenne muscular dystrophy” and “related disorders” refers to a human autosomal recessive disease that is often characterized by over expression of myostatin protein or by genetic mutations in the dystrophin gene in affected individuals. In some embodiments, Duchenne muscular dystrophy and related disorders include, but are not limited to, Becker muscular dystrophy, limb-girdle muscular dystrophy, congenital muscular dystrophy, facioscapulohumeral muscular dystrophy, myotonic muscular dystrophy, oculopharyngeal muscular dystrophy, distal muscular dystrophy, Emery-Dreifuss muscular dystrophy, muscle wasting conditions or disorders, such as AIDS, cancer or chemotherapy related muscle wasting, and fibrosis or fibrosis-related disorders (for example, skeletal muscle fibrosis).

[0274] A “patient,” as used herein, includes any person that exhibits a symptom, or is at risk for exhibiting a symptom, which can be treated as described herein, such as a subject that has or is at risk for having DMD or BMD, or any of the symptoms associated with these conditions (e.g., muscle fibre loss).

[0275] A “pediatric patient” as used herein is a patient from age 1 to 21, inclusive. In some embodiments, the pediatric patient is a patient from age 7 to 21 (e.g., age 7, 8, 9, 10, 11, 12, 13, 14, 15, 16, 17, 18, 19, 20 or 21). In some embodiments, the pediatric patient is a patient of less than seven years of age. In some embodiments, the pediatric patient is a patient of seven years of age or older.

[0276] As used herein, the term “target” or “target region” refers to a region within a pre-mRNA transcript such as myostatin or dystrophin pre-mRNA. In various embodiments, a myostatin target region is a region comprising intron 1/exon 2, exon 2, or exon 2/intron 2 of the myostatin pre-mRNA. In various embodiments, a dystrophin target region is a region comprising one or more of exon 7, exon 8, exon 9, exon 19, exon 23, exon 44, exon 45, exon 50, exon 51, exon 52, exon 53 or exon 55.

[0277] In various embodiments, the term “targeting sequence” refers to the sequence in the modified antisense oligomer or oligomer analog that is complementary to the target sequence in the pre-mRNA transcript. The entire sequence, or only a portion, of the modified antisense oligomer may be complementary to the target sequence. For example, in an oligomer having 12-50 bases, about 7, 8, 9, 10, 11, 12, 13, 14, 15, 16, 17, 18, 19, 20, 21, 22, 23, 24, 25, 26, 27, 28, 29, 30, 31, 32, 33, 34, 35, 36, 37, 38, 39, 40, 41, 42, 43, 44, 45, 46, 47, 48, 49, or 50 may contain sequences (e.g. “targeting sequences”) that are complementary to the target region within the pre-mRNA transcript. Typically, the targeting sequence is formed of contiguous bases in the oligomer, but may alternatively be formed of non-contiguous sequences that when placed together, e.g., from opposite ends of the oligomer, constitute a sequence that spans the target sequence.

[0278] A “targeting sequence” may have “near” or “substantial” complementarity to the target sequence and still function for its intended purpose, for example, to increase the level of dystrophin mRNA expression which excludes one or more exons having a genetic mutation, or to increase expression of functional or semi-functional dystrophin protein. In the case of myostatin, a targeting sequence may function to reduce the level of expression of exon 2 containing myostatin mRNA, or decrease expression of functional myostatin protein. Preferably, modified antisense oligomer compounds in the present disclosure have at most one mismatch with the target sequence out of 10 nucleotides, or one mismatch out of 20. Alternatively, the modified antisense oligomers herein have at least 90% sequence homology, at least 95% sequence homology, at least 99% sequence homology, or 100% sequence homology, with the exemplary target sequences as designated herein.

[0279] In the case of dystrophin, a targeting sequence may comprise a sequence selected from SEQ ID NOS: 76 to 3485, is selected from SEQ ID NOS: 76 to 3485, is a fragment of at least 10 contiguous nucleotides of a sequence selected from SEQ ID NOS: 76 to 3485, or is a variant having at least 90% sequence identity to a sequence selected from SEQ ID NOS: 76 to 3485, wherein each X is independently selected from uracil (U) or thymine (T), and wherein each Y is independently selected from cytosine (C) or 5-Methylcytosine (5 mC). In some embodiments, each X of SEQ ID NOS: 76 to 3485 is thymine (T), and each Y of SEQ ID NOS: 76 to 3485 is cytosine (C). In some embodiments, a targeting sequence may comprise SEQ ID NO: 76.

[0280] In the case of myostatin, a targeting sequence may comprise a sequence selected from SEQ ID NOS: 16 to 75, is selected from SEQ ID NOS: 16 to 75, is a fragment of at least 10 contiguous nucleotides of a sequence selected from SEQ ID NOS: 16 to 75, or is a variant having at least 90% sequence identity to a sequence selected from SEQ ID NOS: 16 to 75, wherein each X is independently selected from uracil (U) or thymine (T), and wherein each Y is independently selected from cytosine (C) or 5-Methylcytosine (5 mC). In some embodiments, each X of SEQ ID NOS: 16 to 75 is thymine (T), and each Y of SEQ ID NOS: 16 to 75 is cytosine (C).

[0281] In some embodiments, the myostatin targeting sequence is selected from:

a)

SEQ ID NO: 71

(YYAGYYYAXYXXYXYYXGGXYYXGG) wherein Z is 25;
b)

SEQ ID NO: 72

(YAYXXAYYAGYYYAXYXXYXYYXGG) wherein Z is 25;
c)

SEQ ID NO: 73

(YYAYXXGYAXXAGAAAAXYAGY) wherein Z is 22;
d)

SEQ ID NO: 74

(GYATTAGAAAATYAGYTATAAATG) wherein Z is 24;
and
e)

SEQ ID NO: 75

(YYATYYGYTTGYATTAGAAAGTYAGY) wherein Z is 26;

[0282] wherein each X is independently selected from uracil (U) or thymine (T), and wherein each Y is independently selected from cytosine (C) or 5-Methylcytosine (5 mC). In some embodiments, each X of SEQ ID NOS: 71 to 75 is thymine (T), and each Y of SEQ ID NOS: 71 to 75 is cytosine (C).

[0283] In various embodiments, at least one X of the targeting sequence is T. In various embodiments, each X of the targeting sequence is T.

[0284] In various embodiments, at least one X of the targeting sequence is U. In various embodiments, each X of the targeting sequence is U.

[0285] In various embodiments, at least one Y of the targeting sequence is 5 mC. In various embodiments, each Y of the targeting sequence is 5 mC.

[0286] In various embodiments, at least one Y of the targeting sequence is C. In various embodiments, each Y of the targeting sequence is C.

[0287] In various embodiments, at least one X of SEQ ID NOS: 16 to 75 and SEQ ID NOS: 76 to 3485 is T. In various embodiments, each X of SEQ ID NOS: 16 to 75 and SEQ ID NOS: 76 to 3485 is T.

[0288] In various embodiments, at least one X of the targeting sequence is U. In various embodiments, each X of SEQ ID NOS: 16 to 75 and SEQ ID NOS: 76 to 3485 is U.

[0289] In various embodiments, at least one Y of SEQ ID NOS: 16 to 75 and SEQ ID NOS: 76 to 3485 is 5 mC. In various embodiments, each Y of SEQ ID NOS: 16 to 75 and SEQ ID NOS: 76 to 3485 is 5 mC.

[0290] In various embodiments, at least one Y of SEQ ID NOS: 16 to 75 and SEQ ID NOS: 76 to 3485 is C. In various embodiments, each Y of SEQ ID NOS: 16 to 75 and SEQ ID NOS: 76 to 3485 is C.

[0291] As used herein, the term “TEG,” “triethylene glycol tail,” or “EG3” refers to triethylene glycol moieties conjugated to the oligomer, e.g., at its 3′- or 5′-end. For example, in some embodiments, “TEG” includes wherein T of the compound of, for example, formulas (I), (IV), (V), (VI), (VII), and (VIII) is of the formula:

[chemical structure]

[0292] As used herein, the term a “therapeutically effective amount” or “effective amount” of a therapeutic agent or composition refers to an amount effective in the prevention or treatment of a disorder for the treatment of which the composition is effective. A “disorder” refers to any Duchenne muscular dystrophy or related disorder, including BMD, limb-girdle muscular dystrophy, congenital muscular dystrophy, facioscapulohumeral muscular dystrophy, myotonic muscular dystrophy, oculopharyngeal muscular dystrophy, distal muscular dystrophy, Emery-Dreifuss muscular dystrophy, muscle wasting conditions or disorders, such as AIDS, cancer or chemotherapy related muscle wasting, and fibrosis or fibrosis-related disorders (for example, skeletal muscle fibrosis).

[0293] As used herein, the terms “quantifying,” “quantification” or other related words refer to determining the quantity, mass, or concentration in a unit volume, of a nucleic acid, oligonucleotide, oligomer, peptide, polypeptide, or protein.

[0294] In various embodiments, as used herein, the term “treatment” includes treatment of a subject (e.g. a mammal, such as a human) or a cell to alter the current course of the subject or cell. Treatment includes, but is not limited to, administration of a pharmaceutical composition, and may be performed either prophylactically or subsequent to the initiation of a pathologic event or contact with an etiologic agent. Also included are “prophylactic” treatments, which can be directed to reducing the rate of progression of the disease or condition being treated, delaying the onset of that disease or condition, or reducing the severity of its onset. “Treatment” or “prophylaxis” does not necessarily indicate complete eradication, cure, or prevention of the disease or condition, or associated symptoms thereof.

### II. MODULATION OF THE SPLICING OF A PRE-MRNA TRANSCRIPT

[0295] For illustration purposes, and without being bound by theory, where a therapeutic agent is a modified antisense oligomer, these are believed to facilitate blocking, inhibiting or modulating the processing of a pre-mRNA, such as by inhibiting the action of a spliceosome and production of a mature mRNA transcript, and may also induce degradation of targeted mRNAs.

[0296] In some instances, a spliceosome may be inhibited from binding to an exon/intron splice junction such that an exon/intron splice junction is skipped and one or more exons are removed from an mRNA transcript. A mature mRNA transcript having one or more exons less than a wildtype mRNA transcript may result in an mRNA transcript that maintains the open reading frame such that the mRNA transcript may be translated to functional protein rather than degraded. A protein translated from an mRNA transcript having fewer exons than the wildtype mRNA may result in a transcribed protein comprising fewer amino acid residues than a protein transcribed from a wildtype mRNA transcript. A functional protein composed of fewer amino acid residues than a wildtype protein may have the same or similar activity/functionality as the wildtype protein. The modified antisense oligomer may be said to be “directed to” or “targeted against” a target sequence or target region with which it hybridizes. In certain embodiments, the target sequence includes a region including a 3′ or 5′ splice junction site of a pre-mRNA, a branch point, Exonic Splicing Enhancers (ESE) or Intronic Splicing Enhancers (ISE), or other sequence involved in the regulation of splicing. Within an intron, a donor site (5′ end of the intron) and an acceptor site (3′ end of the intron) are required for splicing. The splice donor site includes an almost invariant sequence GUat the 5′ end of the intron, within a larger, less highly conserved region. The splice acceptor site at the 3′ end of the intron terminates the intron with an almost invariant AG sequence. The target sequence may include sequences entirely within an exon where no part of the target sequence spans a splice junction, within an exon/intron splice junction site, or spanning an exon/intron splice junction. The target sequence may include an exon/intron donor splice site.

[0297] A modified antisense oligomer having a sufficient sequence complementarity to a target pre-mRNA sequence to modulate splicing of the target RNA includes where the modified antisense oligomer has a sequence sufficient to trigger the masking or hindrance of a binding site for a spliceosome complex that would otherwise affect such splicing and/or otherwise includes alterations in the three-dimensional structure of the targeted pre-mRNA.

[0298] A. Modulation of the Splicing of Myostatin Pre-mRNA

[0299] Various aspects relate to methods for modulating the splicing of intron and exons of myostatin pre-mRNA. Further aspects relate to inhibiting splicing at the splice junction site of intron 1/exon 2 and exon 2/intron 2 of myostatin pre-mRNA. In further aspects, expression of myostatin exon 2 coding mRNA is inhibited, such as relative to exon-2 wildtype mRNA, in a given sample (e.g., serum, plasma, tissue, cellular etc.). Various methods include administering an antisense oligomer described herein containing a targeting sequence that is complementary to a target region within the myostatin pre-mRNA, where expression of myostatin exon 2 mRNA is inhibited relative to the expression of exon-2 wildtype (i.e. control) mRNA.

[0300] In various embodiments, the modified antisense oligomer targeting sequence has sufficient length and complementarity to a sequence within a target region of myostatin pre-mRNA. In various embodiments, targeting sequences within a modified antisense oligomer hybridize to a region of the target sequences entirely within exon 2 where no part of the targeting sequence spans a splice junction, or a region spanning an intron/exon or exon/intron splice junction of myostatin pre-mRNA, such as, for example, the +24/−01 or +18/−07 region of intron 2/exon 2 or the −01/+21, −01/+25, or −09/+15 region of exon 2/intron 2 of myostatin pre-mRNA. In some embodiments, the modified antisense oligomers may about 12 bases to about 40 bases, and include a small number of mismatches, as long as the targeting sequence is sufficiently complementary to effect splice modulation upon hybridization to the target sequence, and optionally forms with the pre-mRNA a heteroduplex having a Tm of 45° C. or greater.

[0301] In various embodiments, the degree of complementarity between the antisense targeting sequence and the target sequence is sufficient to form a stable duplex. The region of complementarity of the modified antisense oligomers with the target sequence may be as short as 12-15 bases but can be 12-20 bases or more, e.g., 12-40 bases, 12-30 bases, 12-25 bases, 12-22 bases, 15-25 bases, 15-22 bases, or 15-20 bases, including all integers in between these ranges. In certain embodiments, a minimum length of complementary bases may be required to achieve the requisite binding Tm, as discussed herein.

[0302] B. Modulation of the Splicing of Dystrophin Pre-mRNA

[0303] Various aspects relate to methods for modulating the splicing of intron and exons of dystrophin pre-mRNA. Further aspects relate to inhibiting splicing at the splice junction site of an intron/exon and exon/intron splice junction of dystrophin pre-mRNA. In further aspects, expression of a truncated form of dystrophin coding mRNA is enhanced, such as relative to full length wildtype dystrophin mRNA, in a given sample (e.g., serum, plasma, tissue, cellular etc.). Various methods include administering an antisense oligomer described herein containing a targeting sequence that is complementary to a target region within the dystrophin pre-mRNA, where expression of a truncated form of dystrophin mRNA is enhanced relative to the expression of full length wildtype (i.e. control) mRNA.

[0304] In various embodiments, an antisense oligomer binds to a target region within an exon of dystrophin pre-mRNA. In embodiments, an antisense oligomer binds to an exon selected from exon 7, exon 8, exon 9, exon 19, exon 23, exon 44, exon 45, exon 50, exon 51, exon 52, exon 53, or exon 55. In embodiments, the target region is entirely within an exon of dystrophin pre-mRNA where no part of the targeting sequence spans a splice junction, or is a region spanning an intron/exon or exon/intron splice junction. In embodiments, one or more exons of dystrophin pre-mRNA have one or more genetic mutations. In embodiments, an antisense oligomer targets an exon having one or more genetic mutations such that the exon is spliced out of the pre-mRNA transcript during processing to mature mRNA resulting in a shortened or truncated form of dystrophin mRNA.

[0305] In various embodiments, the modified antisense oligomer targeting sequence has sufficient length and complementarity to a sequence within a target region of dystrophin pre-mRNA. In various embodiments, targeting sequences within a modified antisense oligomer hybridize to a region of the target sequences entirely within one or more exons where no part of the targeting sequence spans a splice junction, or a region spanning an intron/exon or exon/intron splice junction of dystrophin pre-mRNA. In some embodiments, the modified antisense oligomers may about 8 bases to about 50 bases, and include a small number of mismatches, as long as the targeting sequence is sufficiently complementary to effect splice modulation upon hybridization to the target sequence, and optionally forms with the RNA a heteroduplex having a Tm of 45° C. or greater.

[0306] In various embodiments, the degree of complementarity between the antisense targeting sequence and the target sequence is sufficient to form a stable duplex. The region of complementarity of the modified antisense oligomers with the target sequence may be as short as 8-15 bases but can be 8-20 bases or more, e.g., 8-40 bases, 8-30 bases, 8-25 bases, 8-22 bases, 8-25 bases, 8-22 bases, 8-20 bases. 17 to 20 bases, 17 to 22 bases, 17 bases to 25 bases, 17 to 30 bases, 17 to 40 bases, or 20 to 30 bases, including all integers in between these ranges. In certain embodiments, a minimum length of complementary bases may be required to achieve the requisite binding Tm, as discussed herein.

[0307] In various aspects, the oligomers are configured for additional functionality, including but not limited to bio-availability, stability, cellular update, and resistance to nuclease degradation. Generally, oligomers comprising 50 bases may be suitable, where at least a minimum number of bases, e.g., 8 or 12 bases, are complementary to the target sequence. In various aspects, the oligomers are configured to enhance facilitated or active cellular uptake. In various aspects, the modified antisense oligomers comprise one or more phosphoramidate morpholino monomer or phosphorodiamidate morpholino monomer subunits. In various embodiments, the modified antisense oligomers, comprise about 8-50 phosphoramidate morpholino monomer or phosphorodiamidate morpholino monomer subunits. In various embodiments, the modified antisense oligomers, comprise about 8-30 phosphoramidate morpholino monomer or phosphorodiamidate morpholino monomer subunits. In various embodiments, the modified antisense oligomers, comprise about 17-40 phosphoramidate morpholino monomer or phosphorodiamidate morpholino monomer subunits. In various embodiments, the modified antisense oligomers, comprise about 12-25 phosphoramidate morpholino monomer or phosphorodiamidate morpholino monomer subunits. In various embodiments, the modified antisense oligomers, comprise about 15-25 phosphoramidate morpholino monomer or phosphorodiamidate morpholino monomer subunits. In various embodiments, the modified antisense oligomers, comprise about 15-22 phosphoramidate morpholino monomer or phosphorodiamidate morpholino monomer subunits.

[0308] In various aspects, the modified antisense oligomers comprise, consist of, or consist essentially of 8 to 50 subunits, optionally comprising at least one subunit that is a nucleotide analog having (i) a modified internucleoside linkage, (ii) a modified sugar moiety, or (iii) a combination of the foregoing; and a targeting sequence complementary to a target region of 10 or more contiguous nucleotides within a pre-mRNA. In various embodiments, the target region comprises 10, 12 or more contiguous nucleotides entirely within one or more exons where no part of the targeting sequence spans a splice junction, or within a region spanning an intron/exon or exon/intron splice junction of a myostatin or dystrophin gene.

[0309] In various embodiments, the target region of a myostatin pre-mRNA comprises a region within exon 2, intron 1/exon 2 or exon 2/intron 2 of myostatin pre-mRNA. In further embodiments, the target region comprises the +24/−01 or +18/−07 region of intron 2/exon 2 or the −01/+21,−01/+25, or −09/+15 region of exon 2/intron 2 of myostatin pre-mRNA.

[0310] In various embodiments, the target region of a dystrophin pre-mRNA comprises a region within one or more of an exon selected from exon 7, exon 8, exon 9, exon 19, exon 23, exon 44, exon 45, exon 50, exon 51, exon 52, exon 53, or exon 55 of dystrophin pre-mRNA.

[0311] In various aspects, the modified antisense oligomers comprise, consist of, or consist essentially of 10 to 50 subunits, optionally comprising at least one subunit that is a nucleotide analog having (i) a modified internucleoside linkage, (ii) a modified sugar moiety, or (iii) a combination of the foregoing; and a targeting sequence comprising, consisting of, or consisting essentially of, a sequence selected from SEQ IDS 16 to 75 and SEQ ID NOS: 76-3485. Preferably, in some aspects, the modified antisense oligomer comprises a sequence selected from SEQ IDS 71-75 and SEQ ID NO: 76.

[0312] Additional aspects include modified antisense oligomers of 8 to 50 subunits that specifically hybridize to a target region within myostatin or dystrophin pre mRNA.

[0313] In various embodiments, the target region within myostatin pre-mRNA comprises a region within exon 2, intron 1/exon 2 or exon 2/intron 2 (or a region which spans a splice junction) of the myostatin gene. In various embodiments, the target region comprises a region entirely within exon 2 of myostatin pre-mRNA. In various embodiments, the target region comprises a region within intron 1/exon2 or exon 2/intron 2. In various embodiments, the target region comprises a region spanning an intron 1/exon2 or exon 2/intron 2 splice junction. In further embodiments, the target region comprises the +24/−01 or +18/−07 region of intron 2/exon 2 or the −01/+21, −01/+25, or −09/+15 region of exon 2/intron 2 of myostatin pre-mRNA.

[0314] Additional aspects include modified antisense oligomers having a nucleotide analog subunit comprising a modified sugar moiety. In various embodiments, the modified sugar moiety is selected from a peptide nucleic acid (PNA) subunit, a locked nucleic acid (LNA) subunit, a 2′O,4′C-ethylene-bridged nucleic acid (ENA) subunit, a tricyclo-DNA (tc-DNA) subunit, a 2′ O-methyl subunit, a 2′ O-methoxyethyl subunit, a 2′-fluoro subunit, a 2′-O-[2-(N-methylcarbamoyl)ethyl]subunit, and a morpholino subunit.

[0315] Additional aspects include modified antisense oligomers having a nucleotide analog subunit comprising a modified internucleoside linkage. In various embodiments, the modified intemucleoside linkage is selected from a phosphorothioate internucleoside linkage, a phosphoramidate internucleoside linkage, a phosphorodiamidate intemucleoside linkage, and a phosphorotriamidate internucleoside linkage. In further embodiments, the phosphorodiamidate intemucleoside linkage comprises a phosphorous atom that is covalently bonded to a (1,4-piperazin)-1-yl moiety, a substituted (1,4-piperazin)-1-yl moiety, a 4-aminopiperidin-1-yl moiety, or a substituted 4-aminopiperidin-1-yl moiety.

[0316] Additional aspects include modified antisense oligomers having a nucleotide analog subunit comprising at least one combination of a modified sugar moiety and a modified intemucleoside linkage, wherein various embodiments, one or more subunits are selected from:

[0317] a morpholino subunit optionally substituted with a phosphoramidate internucleoside linkage, a phosphorodiamidate internucleoside linkage, phosphorotriamidate intemucleoside linkage, or a phosphorothioate intemucleoside linkage,
[0318] a 2′ O-methyl subunit optionally substituted with a phosphoramidate intemucleoside linkage, a phosphorodiamidate internucleoside linkage, or a phosphorothioate intemucleoside linkage,
[0319] a 2′O-methoxyethyl subunit optionally substituted with a phosphoramidate intemucleoside linkage, a phosphorodiamidate internucleoside linkage, or a phosphorothioate intemucleoside linkage,
[0320] a 2′-fluoro subunit optionally substituted with a phosphoramidate internucleoside linkage, a phosphorodiamidate internucleoside linkage, or a phosphorothioate internucleoside linkages,
[0321] a 2′O,4′C-ethylene-bridged nucleic acid subunit optionally substituted with a phosphoramidate internucleoside linkage, a phosphorodiamidate internucleoside linkage, or a phosphorothioate internucleoside linkage,
[0322] a 2′-O-[2-(N-methylcarbamoyl)ethyl]subunit optionally substituted with a phosphoramidate internucleoside linkage, a phosphorodiamidate internucleoside linkage, or a phosphorothioate internucleoside linkage,
[0323] a tricyclo-DNA subunit optionally substituted with a phosphoramidate internucleoside linkage, a phosphorodiamidate internucleoside linkage, or a phosphorothioate internucleoside linkage,
[0324] a locked nucleic acid subunit optionally substituted with a phosphoramidate internucleoside linkage, a phosphorodiamidate internucleoside linkage, or a phosphorothioate internucleoside linkage,
[0325] a morpholino subunit further comprising a phosphorodiamidate internucleoside linkage where a phosphorous atom of the phosphorodiamidate is covalently bonded to the nitrogen atom of the morpholino ring, and is covalently bonded to a (1,4-piperazin)-1-yl moiety or to a substituted (1,4-piperazin)-1-yl moiety,
[0326] a morpholino subunit further comprising a phosphorodiamidate internucleoside linkage where a phosphorus atom of the phosphorodiamidate is covalently bonded to a 4-aminopiperdin-1-yl moiety or a substituted 4-aminopiperdin-1-yl moiety,
[0327] a morpholino subunit further comprising a phosphorodiamidate internucleoside linkage where a phosphorus atom of the phosphorodiamidate is covalently bonded to the nitrogen atom of the morpholino ring, and is covalently bonded to a dimethylamino moiety,
[0328] a ribose sugar subunit substituted with a phosphorothioate internucleoside or a phosphoramidate internucleoside linkage,
[0329] a deoxyribose sugar subunit substituted with a phosphorothioate internucleoside linkage or a phosphoramidate internucleoside linkage,
[0330] a peptide nucleic acid subunit optionally substituted,

[0331] or any combination of the foregoing.

[0332] In various aspects and embodiments, modified antisense oligomers of the disclosure further comprise a peptide covalently bonded to the modified antisense oligomer. In various embodiments, an arginine-rich cell-penetrating peptide is conjugated to the 3′ or the 5′ end of the modified antisense oligomer.

[0333] In various embodiments, a modified antisense oligomer may consist of about 8, 9, 10, 11, 12, 13, 14, 15, 16, 17, 18, 19, 20, 21, 22, 23, 24, 25, 26, 27, 28, 29, 30, 31, 32, 33, 34, 35, 36, 37, 38, 39, 40, 41, 42, 43, 44, 45, 46, 47, 48, 49, or 50 bases, or range from 8 to 50, 8 to 40, 8 to 30, 8 to 25, 8 to 20, 8 to 18, 12 to 30, 12 to 25, 10 to 20, 10 to 18, 15 to 30, 15 to 25, 15 to 20, 15 to 18, 17 to 20, 17 to 30, 17 to 40, 18 to 30, 18 to 25, or 18 to 20 bases, including all integers in between these ranges. In some embodiments, the modified antisense oligomer is about 8 to about 50, about 8 to about 40 or about 8 to about 30 bases in length. In some embodiments, the modified antisense oligomer is about 12 to about 25 bases in length. In some embodiments, a modified antisense oligomer sequence comprises at least about 8, 9, 10, 11, 12, 13, 14, 15, 16, 17, 18, 19, 20, 21, 22, 23, 24, 25, 26, 27, 28, 29, 30, 31, 32, 33, 34, 35, 36, 37, 38, 39, 40, 41, 42, 43, 44, 45, 46, 47, 48, 49, or 50 contiguous or non-contiguous bases that are complementary to a target sequence within myostatin or dystrophin pre-mRNA, such as, exon 2, intron 1/exon 2 or exon 2/intron 2 of myostatin pre-mRNA, or one or more of exon 7, exon 8, exon 9, exon 19, exon 23, exon 44, exon 45, exon 50, exon 51, exon 52, exon 53, or exon 55 of dystrophin pre-mRNA, or sequences that span at least a portion of myostatin or dystrophin pre-mRNA.

[0334] A modified antisense oligomer may typically comprise a base sequence which is sufficiently complementary to a sequence or region within exon 2, intron 1/exon 2 or exon 2/intron 2 of the myostatin pre-mRNA sequence of the myostatin protein. Table 1 below recites sequences or regions within exon 2, intron 1/exon 2 and exon 2/intron 2.

TABLE 1
Exemplary Sequences of exon 2, intron 1/exon 2 and exon 2/intron 2 of the
Myostatin Gene

| Region Within | |
|---|---|
| Myostatin Gene | Sequence |
| Intron 1/exon 2/intron 2 | agcaacttttcttttcttattcatttatag/ctgattttctaatgcaagtggatggaaaaccca |
| (SEQ ID NO: 1) | aatgttgcttctttaaatttagctctaaaatacaatacaataaagtagtaaaggcccaact |
| | atggatatatttgagacccgtcgagactcctacaacagtgtttgtgcaaatcctgagact |
| | catcaaacctatgaaagacggtacaaggtatactggaatccgatctctgaaacttgaca |
| | tgaacccaggcactggtatttggcagagcattgatgtgaagacagtgttgcaaaattg |
| | gctcaaacaacctgaatccaacttaggcattgaaataaaagctttagatgagaatggtc |
| | atgatcttgctgtaaccttcccaggaccaggagaagatgggctg/gtaagtgataactg |
| | aaaataacattataat |
| SA2 intron 1/exon 2 | cttttcttttcttattcatttatag/ctgattttctaatgcaagtggatgg |
| (SEQ ID NO: 2) | |
| SD2 exon 2/intron 2 | accttcccaggaccaggagaagatgggctg/gtaagtgataactgaaaataacattat |
| (SEQ ID NO: 3) | aat |

“/” indicates the splice site

[0335] A modified antisense oligomer may typically comprise a base sequence which is sufficiently complementary to a sequence or region within one or more of exons exon 7, exon 8, exon 9, exon 19, exon 23, exon 44, exon 45, exon 50, exon 51, exon 52, exon 53, or exon 55 of dystrophin pre-mRNA sequence of the dystrophin protein. Table 2 below recites sequences or regions within exons exon 7, exon 8, exon 9, exon 19, exon 23, exon 44, exon 45, exon 50, exon 51, exon 52, exon 53, and exon 55.

TABLE 2
Exemplary Sequences of Exon 7, Exon 8, Exon 9, Exon 19, Exon 23, Exon
44, Exon 45, Exon 50, Exon 51, Exon 52, Exon 53, or Exon 55 of the Dystrophin Gene.

| Region Within | |
|---|---|
| Dystrophin Gene | Sequence |
| Exon 7 (SEQ ID NO: 4) | gccagacctatttgactggaatagtgtggtttgccagcagtcagccacacaacgactg |
| | gaacatgcattcaacatcgccagatatcaattaggcatagagaaactactcgatcctg |
| | aag |
| Exon 8 (SEQ ID NO: 5) | atgttgataccacctatccagataagaagtccatcttaatgtacatcacatcactcttcca |
| | agttttgcctcaacaagtgagcattgaagccatccaggaagtggaaatgttgccaagg |
| | ccacctaaagtgactaaagaagaacattttcagttacatcatcaaatgcactattctcaa |
| | cag |
| Exon 9 (SEQ ID NO: 6) | atcacggtcagtctagcacagggatatgagagaacttcttcccctaagcctcgattcaa |
| | gagctatgcctacacacaggctgcttatgtcaccacctctgaccctacacggagccca |
| | tttccttcacag |
| Exon 19 (SEQ ID NO: 7) | gccatagagcgagaaaaagctgagaagttcagaaaactgcaagatgccagcagatc |
| | agctcaggccctggtggaacagatggtgaatg |
| Exon 23 (SEQ ID NO: 8) | gctttacaaagttctctgcaagagcaacaaagtggcctatactatctcagcaccactgt |
| | gaaagagatgtcgaagaaagcgccctctgaaattagccggaaatatcaatcagaattt |
| | gaagaaattgagggacgctggaagaagctctcctcccagctggttgagcattgtcaa |
| | aagctagaggagcaaatgaataaactccgaaaaattcag |
| Exon 44 (SEQ ID NO: 9) | gcgatttgacagatctgttgagaaatggcggcgttttcattatgatataaagatatttaat |
| | cagtggctaacagaagctgaacagtttctcagaaagacacaaattcctgagaattggg |
| | aacatgctaaatacaaatggtatcttaag |
| Exon 45 (SEQ ID NO: | gaactccaggatggcattgggcagcggcaaactgttgtcagaacattgaatgcaact |
| 10) | ggggaagaaataattcagcaatcctcaaaaacagatgccagtattctacaggaaaaat |
| | tgggaagcctgaatctgcggtggcaggaggtctgcaaacagctgtcagacagaaaa |
| | aagag |
| Exon 50 (SEQ ID NO: | aggaagttagaagatctgagctctgagtggaaggcggtaaaccgtttacttcaagag |
| 11) | ctgagggcaaagcagcctgacctagctcctggactgaccactattggagcct |
| Exon 51 (SEQ ID NO: | ctcctactcagactgttactctggtgacacaacctgtggttactaaggaaactgccatct |
| 12) | ccaaactagaaatgccatcttccttgatgttggaggtacctgctctggcagatttcaacc |
| | gggcttggacagaacttaccgactggctttctctgcttgatcaagttataaaatcacaga |
| | gggtgatggtgggtgaccttgaggatatcaacgagatgatcatcaagcagaag |
| Exon 52 (SEQ ID NO: | gcaacaatgcaggatttggaacagaggcgtccccagttggaagaactcattaccgct |
| 13) | gcccaaaatttgaaaaacaagaccagcaatcaagaggctagaacaatcattacggat |
| | cgaa |
| Exon 53 (SEQ ID NO: | ttgaaagaattcagaatcagtgggatgaagtacaagaacaccttcagaaccggaggc |
| 14) | aacagttgaatgaaatgttaaaggattcaacacaatggctggaagctaaggaagaag |
| | ctgagcaggtcttaggacaggccagagccaagcttgagtcatggaaggagggtccc |
| | tatacagtagatgcaatccaaaagaaaatcacagaaaccaag |
| Exon 55 (SEQ ID NO: | ggtgagtgagcgagaggctgctttggaagaaactcatagattactgcaacagttcccc |
| 15) | ctggacctggaaaagtttcttgcctggcttacagaagctgaaacaactgccaatgtcct |
| | acaggatgctacccgtaaggaaaggctcctagaagactccaagggagtaaaagag |
| | ctgatgaaacaatggcaa |

[0336] Preferably, a modified antisense oligomer effectively decreases expression of an exon, such as exon 2, thereby decreasing expression of a functional myostatin protein. Preferably, a modified dystrophin antisense oligomer effectively modulates abberant splicing of the dystrophin pre-mRNA, thereby increasing expression of a functional or semi-functional dystrophin protein. This requirement is optionally met when the oligomer compound has the ability to be actively taken up by mammalian cells, and once taken up, form a stable duplex (or heteroduplex) with the target mRNA, optionally with a Tm greater than about 40° C. or 45° C.

[0337] “Complementary” or “complementary” as used herein, refers to a targeting sequence of a modified antisense oligomer having about 90% to about 100% of the nucleotide targeting sequence complementary to a target sequence. In embodiments, a complementary nucleotide targeting sequence specifically hybridizes to a target sequence to induce a desired effect, for example, a therapeutic effect as described herein. In certain embodiments, targeting sequences of modified antisense oligomers may be 100% complementary to the target sequence, or may include mismatches, e.g., to accommodate variants, as long as a heteroduplex formed between the oligomer targeting sequence and target sequence is sufficiently stable to withstand the action of cellular nucleases and other modes of degradation which may occur in vivo. Hence, certain oligomer targeting sequences may have substantial complementarity, meaning, about or at least about 90% sequence complementarity, e.g., 90%, 91%, 92%, 93%, 94%, 95%, 96%, 97%, 98%, 99% or 100% sequence complementarity, between the oligomer targeting sequence and the target sequence. Oligomer internucleoside linkages that are less susceptible to cleavage by nucleases are provided herein. Mismatches, if present, are typically less destabilizing toward the end regions of the hybrid duplex than in the middle. The number of mismatches allowed will depend on the length of the oligomer, the percentage of G:C base pairs in the duplex, and the position of the mismatch(es) in the duplex, according to well understood principles of duplex stability. Although such a modified antisense oligomer need not necessarily comprise 100% complementary to the target sequence, it should have sufficient complementarity to effectively, stably and specifically bind to the target sequence, such that splicing of the target pre-mRNA is sufficiently modulated, for example, to achieve a therapeutic effect, as described herein.

[0338] Without being bound by theory, the stability of the duplex formed between an oligomer and a target sequence is believed to be a function of the binding Tm and the susceptibility of the duplex to cellular enzymatic cleavage. The Tm of an oligomer with respect to a complementary-sequence RNA duplex may be measured by conventional methods, such as those described by Hames et al., Nucleic Acid Hybridization, IRL Press, 1985, pp. 107-108 or as described in Miyada C. G. and Wallace R. B., 1987, Oligomer Hybridization Techniques, Methods Enzymol. Vol. 154 pp. 94-107, the contents of which are incorporated herein by reference. In various embodiments, the modified antisense oligomers have a binding Tm, with respect to a complementary-sequence RNA duplex, of greater than body temperature, such as, for example, greater than about 45° C. or 50° C. Tm's in the range 60-80° C. or greater are also included. According to well-known principles, the Tm of an oligomer, with respect to a complementary-based RNA hybrid duplex, can be increased by increasing the ratio of C:G paired bases in the duplex, and/or by increasing the length (in base pairs) of the heteroduplex.

[0339] Table 3 below shows exemplary targeting sequences (in a 5′-to-3′ orientation) that are complementary to the target regions within exon 2, intron 1/exon 2 or exon 2/intron 2 of myostatin pre-mRNA.

| Targeting Sequence | Sequence |
|---|---|
| MSTN-D30 | cagcccatcttctcctggtcctgggaag |
| (SEQ ID NO: 16) | gt |
| muhuMSTN-SD2(+24−01) | ccagcccatcttctcctggtcctgg |
| (SEQ ID NO: 17) | |
| muhuMSTN-SD2(+18−07) | cacttaccagcccatcttctcctgg |
| (SEQ ID NO: 18) | |
| huMSTN-SA2(−01+25) | ccatccgcttgcattagaaagtcagc |
| (SEQ ID NO: 19) | |
| huMSTN-SA2(−09+15) | gcattagaaaatcagctataaatg |
| (SEQ ID NO: 20) | |
| huMSTN-SA2(−01+21) | ccacttgcattagaaaatcagc |
| (SEQ ID NO: 21) | |
| huMSTN-SA2(−07+18) | cttgcattagaaaatcagctataaa |
| (SEQ ID NO: 22) | |
| huMSTN-SA2(−05+20) | cacttgcattagaaaatcagctata |
| (SEQ ID NO: 23) | |
| huMSTN-SA2(−04+21) | ccacttgcattagaaaatcagctat |
| (SEQ ID NO: 24) | |
| huMSTN-SA2(−03+22) | tccacttgcattagaaaatcagcta |
| (SEQ ID NO: 25) | |
| huMSTN-SA2(−02+23) | atccacttgcattagaaaatcagct |
| (SEQ ID NO: 26) | |
| huMSTN-SA2(−01+24) | catccacttgcattagaaaatcagc |
| (SEQ ID NO: 27) | |
| muhuMSTN-SD2(+04−21) | ttattttcagttatcacttaccagc |
| (SEQ ID NO: 28) | |
| muhuMSTN-SD2(+07−18) | ttttcagttatcacttaccagccca |
| (SEQ ID NO: 29) | |
| muhuMSTN-SD2(+10−15) | tcagttatcacttaccagcccatct |
| (SEQ ID NO: 30) | |
| muhuMSTN-SD2(+13−12) | gttatcacttaccagcccatcttct |
| (SEQ ID NO: 31) | |
| muhuMSTN-SD2(+16−09) | atcacttaccagcccatcttctcct |
| (SEQ ID NO: 32) | |
| muhuMSTN-SD2(+19−06) | acttaccagcccatcttctcctggt |
| (SEQ ID NO: 33) | |
| muhuMSTN-SD2(+22−03) | taccagcccatcttctcctggtcct |
| (SEQ ID NO: 34) | |
| muhuMSTN-SD2(+01−24) | atgttattttcagttatcacttacc |
| (SEQ ID NO: 35) | |
| muhuMSTN-SD2(+02−23) | tgttattttcagttatcacttacca |
| (SEQ ID NO: 36) | |
| muhuMSTN-SD2(+03−22) | gttattttcagttatcacttaccag |
| (SEQ ID NO: 37) | |
| muhuMSTN-SD2(+05−20) | tattttcagttatcacttaccagcc |
| (SEQ ID NO: 38) | |
| muhuMSTN-SD2(+06−19) | attttcagttatcacttaccagccc |
| (SEQ ID NO: 39) | |
| muhuMSTN-SD2(+08−17) | tttcagttatcacttaccagcccat |
| (SEQ ID NO: 40) | |
| muhuMSTN-SD2(+09−16) | ttcagttatcacttaccagcccatc |
| (SEQ ID NO: 41) | |
| muhuMSTN-SD2(+11−14) | cagttatcacttaccagcccatctt |
| (SEQ ID NO: 42) | |
| muhuMSTN-SD2(+12−13) | agttatcacttaccagcccatcttc |
| (SEQ ID NO: 43) | |
| Mstn D (′139 app) | cagcccatcttctcctggtcctgggaag |
| (SEQ ID NO: 44) | gt |
| GDF8/D3 (′139 app) | cagcccatcttctcctggtc |
| (SEQ ID NO: 45) | |
| GDF8/D2 (′139 app) | tctcctggtcctgggaaggt |
| (SEQ ID NO: 46) | |
| GDF8/D1 (′139 app) | ctgggaaggttacagcaaga |
| (SEQ ID NO: 47) | |
| huMSTN-SD2(+18+1) | cagcccatcttctcctgg |
| (SEQ ID NO: 48) | |
| muhuMSTN-SD2(+25+03) | gcccatcttctcctggtcctggg |
| (SEQ ID NO: 49) | |
| huMSTN-SA2(+26+50) | tttaaagaagcaacatttgggtttt |
| (SEQ ID NO: 50) | |
| huMSTN-SA2(+41+65) | tattttagagctaaatttaaagaag |
| (SEQ ID NO: 51) | |
| huMSTN-SA2(+56+80) | tactttattgtattgtattttagag |
| (SEQ ID NO: 52) | |
| huMSTN-SA2(+71+95) | tagttgggcctttactactttattg |
| (SEQ ID NO: 53) | |
| huMSTN-SA2(+86+110) | tctcaaatatatccatagttgggcc |
| (SEQ ID NO: 54) | |
| huMSTN-SA2(+91+115) | acgggtctcaaatatatccatagtt |
| (SEQ ID NO: 55) | |
| huMSTN-SA2(+101+130) | gttgtaggagtctcgacgggtctcaaat |
| (SEQ ID NO: 56) | at |
| huMSTN-SA2(+111+135) | acactgttgtaggagtctcgacggg |
| (SEQ ID NO: 57) | |
| huMSTN-SA2(+141+165) | taggtttgatgagtctcaggatttg |
| (SEQ ID NO: 58) | |
| huMSTN-SA2(+151+175) | ccgtctttcataggtttgatgagtc |
| (SEQ ID NO: 59) | |
| huMSTN-SA2(+160+189) | cagtataccttgtaccgtctttcatagg |
| (SEQ ID NO: 60) | tt |
| huMSTN-SA2(+196+220) | gggttcatgtcaagtttcagagatc |
| (SEQ ID NO: 61) | |
| huMSTN-SA2(+204+233) | aataccagtgcctgggttcatgtcaagt |
| (SEQ ID NO: 62) | tt |
| huMSTN-SA2(+210+234) | aaataccagtgcctgggttcatgtc |
| (SEQ ID NO: 63) | |
| huMSTN-SA2(+216+240) | tctgccaaataccagtgcctgggtt |
| (SEQ ID NO: 64) | |
| huMSTN-SA2(+231+255) | tcttcacatcaatgctctgccaaat |
| (SEQ ID NO: 65) | |
| huMSTN-SA2(+261+285) | caggttgtttgagccaattttgcaa |
| (SEQ ID NO: 66) | |
| huMSTN-SA2(+276+291) | tgcctaagttggattcaggttgttt |
| (SEQ ID NO: 67) | |
| huMSTN-SA2(+291+305) | aagcttttatttcaatgcctaagtt |
| (SEQ ID NO: 68) | |
| huMSTN-SA2(+306+330) | gaccattctcatctaaagcttttat |
| (SEQ ID NO: 69) | |
| huMSTN-SA2(+321+345) | ttacagcaagatcatgaccattctc |
| (SEQ ID NO: 70) | |

“/” indicates the splice site

[0340] Certain modified antisense oligomers thus comprise, consist, or consist essentially of a sequence in Table 3 (e.g., SEQ ID NOS: 16 to 75), is selected from SEQ ID NOS: 16 to 75, is a fragment of at least 12 contiguous nucleotides of a sequence selected from SEQ ID NOS: 16 to 75, or is a variant having at least 90% sequence identity to a sequence selected from SEQ ID NOS: 16 to 75, wherein each X is independently selected from uracil (U) or thymine (T), and wherein each Y is independently selected from cytosine (C) or 5-Methylcytosine (5 mC). For instance, certain modified antisense oligomers comprise about or at least about 12, 13, 14, 15, 16, 17, 18, 19, 20, 21, 22, 23, 24, 25, 26, 27, 28, 29, 30, 31, 32, 33, 34, 35, 36, 37, 38, 39, or 40 contiguous or non-contiguous nucleotides of any of SEQ ID NOS: 16 to 75. For non-contiguous portions, intervening nucleotides can be deleted or substituted with a different nucleotide, or intervening nucleotides can be added. Additional examples of variants include oligomers having about or at least about 90% sequence identity or homology, e.g., 90%, 91%, 92%, 93%, 94%, 95%, 96%, 97%, 98%, 99% or 100% sequence identity or homology, over the entire length of any of SEQ ID NOS: 16 to 75. In certain embodiments, the targeting sequence is selected from SEQ ID NOS: 16 to 75.

[0341] Oligonucleotides that target the dystrophin gene are disclosed in WO 2006/000057, WO 2011/057350, WO 2010/048586, WO 2014/100714, WO 2014/153220, US Application No. US20140315862, US Application No. US20140323544, US Application No. US20120202752, US Application No. US20030235845, US Application No. US20110312086, US Application No. US20090312532, US Application No. US20090269755, US Application No. US20130211062, US Application No. US20140343266, US Application No. US20120059042, US Application No. US20110294753, US Application No. US20140113955, US Application No. US20150166996, US Application No. US20150203849, US Application No. US20150045413, and US Application No. US20140057964, which are hereby incorporated by reference in their entireties.

[0342] Certain modified antisense oligomers thus comprise, consist, or consist essentially of a sequence in Table 4 (e.g., SEQ ID NOS: 76 to 3485), is selected from SEQ ID NOS: 76 to 3485, is a fragment of at least 10 contiguous nucleotides of a sequence selected from SEQ ID NOS: 76 to 3485, or is a variant having at least 90% sequence identity to a sequence selected from SEQ ID NOS: 76 to 3485, wherein each X is independently selected from uracil (U) or thymine (T), and wherein each Y is independently selected from cytosine (C) or 5-Methylcytosine (5 mC). For instance, certain modified antisense oligomers comprise about or at least about 8, 9, 10, 11, 12, 13, 14, 15, 16, 17, 18, 19, 20, 21, 22, 23, 24, 25, 26, 27, 28, 29, 30, 31, 32, 33, 34, 35, 36, 37, 38, 39, or 40 contiguous or non-contiguous nucleotides of any of SEQ ID NOS: 76 to 3485. For non-contiguous portions, intervening nucleotides can be deleted or substituted with a different nucleotide, or intervening nucleotides can be added. Additional examples of variants include oligomers having about or at least about 90% sequence identity or homology, e.g., 90%, 91%, 92%, 93%, 94%, 95%, 96%, 97%, 98%, 99% or 100% sequence identity or homology, over the entire length of any of SEQ ID NOS: 76 to 3485. In certain embodiments, the targeting sequence is selected from SEQ ID NOS: 76 to 3485. In some embodiments, a targeting sequence may comprise SEQ ID NO: 76.

[0343] The activity/functionality of modified antisense oligomers and variants thereof can be assayed according to routine techniques in the art. For example, splice forms and expression levels of surveyed RNAs may be assessed by any of a wide variety of well-known methods for detecting splice forms and/or expression of a transcribed nucleic acid or protein. Non-limiting examples of such methods include RT-PCR of spliced forms of RNA followed by size separation of PCR products, nucleic acid hybridization methods e.g., Northern blots and/or use of nucleic acid arrays; nucleic acid amplification methods; immunological methods for detection of proteins; protein purification methods; and protein function or activity assays.

[0344] RNA expression levels can be assessed by preparing mRNA/cDNA (i.e., a transcribed oligonucleotide) from a cell, tissue or organism, and by hybridizing the mRNA/cDNA with a reference oligonucleotide that is a complement of the assayed nucleic acid, or a fragment thereof cDNA can, optionally, be amplified using any of a variety of polymerase chain reaction or in vitro transcription methods prior to hybridization with the complementary oligonucleotide; preferably, it is not amplified. Expression of one or more transcripts can also be detected using quantitative PCR to assess the level of expression of the transcript(s).

### III. MODIFIED ANTISENSE OLIGOMER CHEMISTRIES

[0345] A. General Characteristics

[0346] In various aspects and embodiments, the modified antisense oligomers specifically hybridize to target region within myostatin pre-mRNA. Exemplary modified antisense oligomers comprise a targeting sequence set forth in Table 3, a fragment of at least 12 contiguous nucleotides of a targeting sequence in Table 3, or a variant having at least 90% sequence identity to a targeting sequence in Table 3. Other exemplary modified antisense oligomers consist or consist essentially of a targeting sequence set forth in Table 3.

[0347] In various aspects and embodiments, the modified antisense oligomers specifically hybridize to target region within dystrophin pre-mRNA. Exemplary modified antisense oligomers comprise a targeting sequence set forth in Table 4, a fragment of at least 10 contiguous nucleotides of a targeting sequence in Table 4, or a variant having at least 90% sequence identity to a targeting sequence in Table 4. Other exemplary modified antisense oligomers consist or consist essentially of a targeting sequence set forth in Table 4.

[0348] Nuclease-resistant modified antisense oligomers are provided in a further aspect. In various embodiments, a modified antisense oligomer is provided comprising one or more intemucleoside linkage modification(s). In other embodiments, a modified antisense oligomer is provided comprising one or more modified sugar moieties. In other embodiments, a modified antisense oligomer is provided comprising a combination of one or more modified intemucleoside linkages and one or more modified sugar moieties. In other embodiments, a modified antisense oligomer is provided comprising a modified nucleobase, alone or in combination with any of a modified internucleoside linkage or a modified sugar moiety.

[0349] In various embodiments, a modified antisense oligomer may comprise an oligomer having completely modified internucleoside linkages, for example, 100% of the internucleoside linkages are modified (for example, a 25-mer modified antisense oligomer comprises 24 internucleoside linkages modified with one or any combination of the modifications as described herein). In various embodiments, a modified antisense oligomer may comprise about 100% to 2.5% of its internucleoside linkages modified. In various embodiments, a modified antisense oligomer may comprise about 99%, 95%, 90%, 85%, 80%, 75%, 70%, 65%, 60%, 55%, 50%, 45%, 40%, 35%, 30%, 25%, 20%, 15%, 10%, 5%, or 2.5% of its internucleoside linkages modified, and iterations in between. In other embodiments, a modified antisense oligomer may comprise any combination of modifications as described herein.

[0350] In various embodiments, including embodiments in combination with embodiments of percent of modified internucleoside linkages, a modified antisense oligomer may comprise an oligomer having completely modified sugar moieties, for example, 100% of the sugar moieties are modified (for example, a 25 mer modified antisense oligomer comprises 25 sugar moieties modified with one or any combination of the modifications as described herein). In various embodiments, a modified antisense oligomer may comprise about 100% to 2.5% of its sugar moieties modified. In various embodiments, a modified antisense oligomer may comprise about 99%, 95%, 90%, 85%, 80%, 75%, 70%, 65%, 60%, 55%, 50%, 45%, 40%, 35%, 30%, 25%, 20%, 15%, 10%, 5%, or 2.5% of its sugar moieties modified, and iterations in between. In other embodiments, a modified antisense oligomer may comprise any combination of modifications as described herein.

[0351] In various embodiments, the modified antisense oligomer is substantially uncharged, and is optionally suitable as a substrate for active or facilitated transport across the cell membrane. In some embodiments, all of the internucleoside linkages are uncharged. The ability of the oligomer to form a stable duplex with the target pre-mRNA may also relate to other features of the oligomer, including the length and degree of complementarity of the modified antisense oligomer with respect to the target, the ratio of G:C to A:T base matches, and the positions of any mismatched bases. The ability of the modified antisense oligomer to resist cellular nucleases may promote survival and ultimate delivery of the agent to the cell cytoplasm.

[0352] In various embodiments, the modified antisense oligomer has at least one internucleoside linkage that is positively charged or cationic at physiological pH. In further embodiments, the modified antisense oligomer has at least one internucleoside linkage that exhibits a pKa between about 5.5 and about 12. In further embodiments, the modified antisense oligomer contains about, at least about, or no more than about 1, 2, 3, 4, 5, 6, 7, 8, 9, or 10 internucleoside linkages that exhibits a pKa between about 4.5 and about 12. In some embodiments, the modified antisense oligomer contains about or at least about 10%, 15%, 20%, 25%, 30%, 35%, 40%, 45%, 50%, 55%, 60%, 65%, 70%, 75%, 80%, 85%, 90%, 95%, or 100% internucleoside linkages that exhibit a pKa between about 4.5 and about 12. Optionally, the modified antisense oligomer has at least one internucleoside linkage with both a basic nitrogen and an alkyl, aryl, or aralkyl group. In particular embodiments, the cationic internucleoside linkage or linkages comprise a 4-aminopiperdin-1-yl (APN) group, or a derivative thereof. In some embodiments, the modified antisense oligomer comprises a morpholino ring. While not being bound by theory, it is believed that the presence of a cationic linkage or linkages (e.g., APN group or APN derivative) in the oligomer facilitates binding to the negatively charged phosphates in the target nucleotide. Thus, the formation of a heteroduplex between mutant RNA and the cationic linkage-containing oligomer may be held together by both an ionic attractive force and Watson-Crick base pairing.

[0353] In various embodiments, the number of cationic linkages is at least 2 and no more than about half the total internucleoside linkages, e.g., about or no more than about 1, 2, 3, 4, 5, 6, 7, 8, 9, 10, 11, 12, 13, 14, 15, 16, 17, 18, 19, 20 cationic linkages. In some embodiments, however, up to all of the internucleoside linkages are cationic linkages, e.g., about or at least about 1, 2, 3, 4, 5, 6, 7, 8, 9, 10, 11, 12, 13, 14, 15, 16, 17, 18, 19, 20, 21, 22, 23, 24, 25, 26, 27, 28, 29, 30, 31, 32, 33, 34, 35, 36, 37, 38, 39, or 40 of the total internucleoside linkages are cationic linkages. In further embodiments, an oligomer of about 19-20 monomer subunits may have 2-10, e.g., 4-8, cationic linkages, and the remainder uncharged linkages. In other specific embodiments, an oligomer of 14-15 subunits may have 2-7, e.g., 2, 3, 4, 5, 6, or 7 cationic linkages and the remainder uncharged linkages. The total number of cationic linkages in the oligomer can thus vary from about 1 to 10 to 18 to 20 to 30 or more (including all integers in between), and can be interspersed throughout the oligomer.

[0354] In some embodiments, a modified antisense oligomer may have about or up to about 1 cationic linkage per every 2-5 or 2, 3, 4, or 5 uncharged linkages, such as about 4-5 or 4 or 5 per every 10 uncharged linkages.

[0355] Certain embodiments include modified antisense oligomers that contain about 10%, 15%, 20%, 25%, 30%, 35%, 40%, 45%, 50%, 55%, 60%, 65%, 70%, 75%, 80%, 85%, 90%, 95%, or 100% cationic linkages. In certain embodiments, optimal improvement in antisense activity may be seen if about 25% of the internucleoside linkages are cationic. In certain embodiments, enhancement may be seen with a small number e.g., 10-20% cationic linkages, or where the number of cationic linkages is in the range 50-80%, such as about 60%.

[0356] In further embodiments, the cationic linkages are interspersed along the internucleoside linkage. Such oligomers optionally contain at least two consecutive uncharged linkages; that is, the oligomer optionally does not have a strictly alternating pattern along its entire length. In specific instances, each one or two cationic linkage(s) is/are separated along the internucleoside linkage by at least 1, 2, 3, 4, or 5 uncharged linkages.

[0357] Also included are oligomers having blocks of cationic linkages and blocks of uncharged linkages. For example, a central block of uncharged linkages may be flanked by blocks of cationic linkages, or vice versa. In some embodiments, the oligomer has approximately equal-length 5′, 3′ and center regions, and the percentage of cationic linkages in the center region is greater than about 50%, 60%, 70%, or 80% of the total number of cationic linkages.

[0358] In certain modified antisense oligomers, the bulk of the cationic linkages (e.g., 70, 75%, 80%, 90% of the cationic linkages) are distributed close to the “center-region” of the internucleoside linkages, e.g., the 6, 7, 8, 9, 10, 11, 12, 13, 14, or 15 centermost linkages. For example, a 16, 17, 18, 19, 20, 21, 22, 23, or 24-mer oligomer may have at least 50%, 60%, 70%, or 80% of the total cationic linkages localized to the 8, 9, 10, 11, or 12 centermost linkages.

[0359] B. Chemistry Features

[0360] The modified antisense oligomers may contain a variety of nucleotide analog subunits. Further examples include:

[0361] phosphoramidate containing oligomers,

[0362] phosphorodiamidate containing oligomers,

[0363] phosphorotriamidate containing oligomers,

[0364] phosphorothioate containing oligomers,

[0365] morpholino containing oligomers optionally substituted with a phosphoramidate internucleoside linkage or a phosphorodiamidate internucleoside linkage,

[0366] 2′O-methyl containing oligomers optionally substituted with a phosphorothioate internucleoside linkage,

[0367] locked nucleic acid (LNA) containing oligomers optionally substituted with a phosphorothioate internucleoside linkage,

[0368] 2′ O-methoxyethyl (MOE) containing oligomers optionally substituted with a phosphorothioate internucleoside linkage,

[0369] 2′-fluoro-containing oligomers optionally substituted with a phosphorothioate internucleoside linkage,

[0370] 2′O,4′C-ethylene-bridged nucleic acids (ENAs) containing oligomers optionally substituted with a phosphorothioate internucleoside linkage,

[0371] tricyclo-DNA (tc-DNA) containing oligomers optionally substituted with a phosphorothioate internucleoside linkage,

[0372] 2′-O-[2-(N-methylcarbamoyl)ethyl]containing oligomers optionally substituted with a phosphorothioate internucleoside linkage,

[0373] morpholino containing oligomers further comprising a phosphorodiamidate internucleoside linkage wherein the phosphorous atom of the phosphorodiamidate is covalently bonded to the nitrogen atom of a morpholino ring, and is covalently bonded to a (1,4-piperazin)-1-yl moiety or to a substituted (1,4-piperazin)-1-yl (PMOplus) moiety,

[0374] morpholino containing oligomers further comprising a phosphorodiamidate internucleoside linkage wherein the phosphorus atom of the phosphorodiamidate is covalently bonded to the nitrogen atom of a morpholino ring and is covalently bonded to a 4-aminopiperdin-1-yl moiety (i.e., APN) or a substituted 4-aminopiperdin-1-yl (PMO-X) moiety,

[0375] a morpholino subunit further comprising a phosphorodiamidate internucleoside linkage where a phosphorus atom of the phosphorodiamidate is covalently bonded to the nitrogen atom of the morpholino ring, and is covalently bonded to a dimethylamino moiety,

[0376] ribose sugar containing oligomers further comprising a phosphorothioate internucleoside linkage or a phosphoramidate internucleoside linkage,

[0377] deoxyribose sugar containing oligomers further comprising a phosphorothioate internucleoside linkage oligomer or a phosphoramidate internucleoside linkage,

[0378] peptide-conjugated phosphorodiamidate morpholino containing oligomers (PPMO) which are further optionally substituted,

[0379] peptide nucleic acid (PNA) oligomers which are further optionally substituted including further substitutions,

[0380] and combinations of any of the foregoing.

[0381] In certain embodiments, the phosphorous atom of a phosphorodiamidate linkage is further substituted with a (1,4-piperazin)-1-yl moiety, a substituted (1,4-piperazin)-1-yl moiety, a 4-aminopiperidin-1-yl moiety, or a substituted 4-aminopiperidin-1-yl moiety.

[0382] In general, PNA and LNA chemistries can utilize shorter targeting sequences because of their relatively high target binding strength relative to PMO and 2′O-Me oligomers. Phosphorothioate and 2′O-Me chemistries can be combined to generate a 2′O-Me-phosphorothioate analog. See, e.g., PCT Publication Nos. WO/2013/112053 and WO/2009/008725, which are hereby incorporated by reference in their entireties.

[0383] In some instances, modified antisense oligomers, such as phosphorodiamidate morpholino oligomers (PMO), can be conjugated to cell penetrating peptides (CPPs) to facilitate intracellular delivery. Peptide-conjugated PMOs are called PPMOs and certain embodiments include those described in PCT Publication No. WO/2012/150960, which is hereby incorporated by reference in its entirety. In some embodiments, an arginine-rich peptide sequence conjugated or linked to, for example, the 3′ terminal end of a modified antisense oligomer as described herein may be used.

### 1. Peptide Nucleic Acids (PNAs)

[0384] Peptide nucleic acids (PNAs) are analogs of DNA in which the backbone is structurally homomorphous with a deoxyribose backbone, consisting of N-(2-aminoethyl) glycine units to which pyrimidine or purine bases are attached. PNAs containing natural pyrimidine and purine bases hybridize to complementary oligomers obeying Watson-Crick base-pairing rules, and mimic DNA in terms of base pair recognition (Egholm, Buchardt et al. 1993). The internucleoside linkages of PNAs are formed by peptide bonds rather than phosphodiester bonds, making them well-suited for antisense applications (see structure below). The backbone is uncharged, resulting in PNA/DNA or PNA/RNA duplexes that exhibit greater than normal thermal stability. PNAs are not recognized by nucleases or proteases. A non-limiting example of a PNA oligomer comprising PNA subunits is depicted below:

[chemical structure]

[0385] Despite a radical structural change to the natural structure, PNAs are capable of sequence-specific binding in a helix form to DNA or RNA. Characteristics of PNAs include a high binding affinity to complementary DNA or RNA, a destabilizing effect caused by single-base mismatch, resistance to nucleases and proteases, hybridization with DNA or RNA independent of salt concentration and triplex formation with homopurine DNA. PANAGENE (Daejeon, Korea) has developed Bts PNA monomers (Bts; benzothiazole-2-sulfonyl group) and oligomerization process. The PNA oligomerization using Bts PNA monomers is composed of repetitive cycles of deprotection, coupling and capping. PNAs can be produced synthetically using any technique known in the art. See, e.g., U.S. Pat. Nos. 6,969,766, 7,211,668, 7,022,851, 7,125,994, 7,145,006 and 7,179,896. See also U.S. Pat. Nos. 5,539,082; 5,714,331; and 5,719,262 for the preparation of PNAs. Further teaching of PNA compounds can be found in Nielsen et al., Science, 254:1497-1500, 1991. Each of the foregoing is hereby incorporated by reference in its entirety.

### 2. Locked Nucleic Acids (LNAs)

[0386] Modified antisense oligomer compounds may also contain “locked nucleic acid” subunits (LNAs). “LNAs” are a member of a class of modifications called bridged nucleic acid (BNA). BNA is characterized by a covalent linkage that locks the conformation of the ribose ring in a C30-endo (northern) sugar pucker. For LNA, the bridge is composed of a methylene between the 2′-O and the 4′-C positions. LNA enhances backbone preorganization and base stacking to increase hybridization and thermal stability.

[0387] The structures of LNAs can be found, for example, in Wengel, et al., Chemical Communications (1998) 455; Tetrahedron (1998) 54:3607, and Accounts of Chem. Research (1999) 32:301); Obika, et al., Tetrahedron Letters (1997) 38:8735; (1998) 39:5401, and Bioorganic Medicinal Chemistry (2008) 16:9230, which are hereby incorporated by reference in their entirety. A non-limiting example of an LNA oligomer comprising LNA subunits and phosphodiester internucleoside linkages is depicted below:

[chemical structure]

[0388] Compounds of the disclosure may incorporate one or more LNAs; in some cases, the compounds may be entirely composed of LNAs. Methods for the synthesis of individual LNA nucleoside subunits and their incorporation into oligomers are described, for example, in U.S. Pat. Nos. 7,572,582, 7,569,575, 7,084,125, 7,060,809, 7,053,207, 7,034,133, 6,794,499, and 6,670,461, which are hereby incorporated by reference in their entirety. Typical internucleoside linkers include phosphodiester and phosphorothioate moieties; alternatively, non-phosphorous containing linkers may be employed. Further embodiments include an LNA containing compound where each LNA subunit is separated by a DNA subunit. Certain compounds are composed of alternating LNA and DNA subunits where the internucleoside linker is phosphorothioate.

[0389] 2′O,4′C-ethylene-bridged nucleic acids (ENAs) are another member of the class of BNAs. A non-limiting example of an ENA subunit and phosphodiester internucleoside linkage is depicted below:

[chemical structure]

[0390] ENA oligomers and their preparation are described in Obika et al., Tetrahedron Ltt 38(50): 8735, which is hereby incorporated by reference in its entirety. Compounds of the disclosure may incorporate one or more ENA subunits.

### 3. Phosphorothioates

[0391] “Phosphorothioates” (or S-oligos) are a variant of native DNA or RNA in which one of the nonbridging oxygens of the phosphodiester internucleoside linkages is replaced by sulfur. A non-limiting example of a phosphorothioate DNA (left), comprising deoxyribose subunits and phosphorothioate internucleoside linkages, and phosphorothioate RNA (right), comprising ribose subunits and phosophorothioate internucleoside linkages, are depicted below:

[chemical structure]

[0392] The sulfurization of the internucleoside bond reduces the action of endo- and exonucleases including 5′ to 3′ and 3′ to 5′ DNA POL 1 exonuclease, nucleases S1 and P1, RNases, serum nucleases and snake venom phosphodiesterase. Phosphorothioates may be made by two principal routes: by the action of a solution of elemental sulfur in carbon disulfide on a hydrogen phosphonate, or by the method of sulfurizing phosphite triesters with either tetraethylthiuram disulfide (TETD) or 3H-1, 2-bensodithiol-3-one 1, 1-dioxide (BDTD) (see, e.g., Iyer et al., J. Org. Chem. 55, 4693-4699, 1990, which are hereby incorporated by reference in their entirety). The latter methods avoid the problem of elemental sulfur's insolubility in most organic solvents and the toxicity of carbon disulfide. The TETD and BDTD methods also yield higher purity phosphorothioates.

### 4. Tricyclo-DNAs and Tricyclo-Phosphorothioate Nucleotides

[0393] Tricyclo-DNAs (tc-DNA) are a class of constrained DNA analogs in which each nucleotide is modified by the introduction of a cyclopropane ring to restrict conformational flexibility of the backbone and to optimize the backbone geometry of the torsion angle γ. Homobasic adenine- and thymine-containing tc-DNAs form extraordinarily stable A-T base pairs with complementary RNAs. Tricyclo-DNAs and their synthesis are described in PCT Publication No. WO 2010/115993, which is hereby incorporated by reference in its entirety. Compounds of the disclosure may incorporate one or more tricyclo-DNA subunits; in some cases, the compounds may be entirely composed of tricyclo-DNA subunits.

[0394] Tricyclo-phosphorothioate nucleotides are tricyclo-DNA subunits with phosphorothioate internucleoside linkages. Tricyclo-phosphorothioate nucleotides and their synthesis are described in PCT Publication No. WO 2013/053928, which is hereby incorporated by reference in its entirety. Compounds of the disclosure may incorporate one or more tricyclo-DNA subunits; in some cases, the compounds may be entirely composed of tricyclo-DNA nucleotides. A non-limiting example of a tricyclo-DNA/tricycle subunit and phosphodiester internucleoside linkage is depicted below:

[chemical structure]

### 5. 2′ O-Methyl, 2′ O-MOE, and 2′-F Oligomers

[0395] “2′O-Me oligomer” molecules comprise subunits that carry a methyl group at the 2′-OH residue of the ribose molecule. 2′-O-Me-RNAs show the same (or similar) behavior as DNA, but are protected against nuclease degradation. 2′-O-Me-RNAs can also be combined with phosphorothioate oligomers (PTOs) for further stabilization. 2′O-Me oligomers (wherein the 2′-OMe subunits are connected by phosphodiester or phosphorothioate internucleoside linkages) can be synthesized according to routine techniques in the art (see, e.g., Yoo et al., Nucleic Acids Res. 32:2008-16, 2004, which is hereby incorporated by reference in its entirety). A non-limiting example of a 2′ O-Me oligomer comprising 2′-OMe subunits and phosphodiester intersubunit linkages is depicted below:

[chemical structure]

[0396] 2′ O-Me oligomers may also comprise a phosphorothioate linkage (2′ O-Me phosphorothioate oligomers). 2′ O-Methoxyethyl Oligomers (2′-O MOE), like 2′ O-Me oligomers, comprise subunits that carry a methoxyethyl group at the 2′-OH residue of the ribose molecule and are discussed in Martin et al., Helv. Chim. Acta, 78, 486-504, 1995, which is hereby incorporated by reference in its entirety. A non-limiting example of a 2′ O-MOE subunit is depicted below:

[chemical structure]

[0397] In contrast to the preceding alkylated 2′OH ribose derivatives, 2′-fluoro oligomers comprise subunits that have a fluoro radical in at the 2′ position in place of the 2′OH. A non-limiting example of a 2′-F oligomer comprising 2′-F subunits and phosphodiester internucleoside linkages is depicted below:

[chemical structure]

[0398] 2′-fluoro oligomers are further described in WO 2004/043977, which is hereby incorporated by reference in its entirety. Compounds of the disclosure may incorporate one or more 2′O-Methyl, 2′ O-MOE, and 2′ F subunits and may utilize any of the internucleoside linkages described here. In some instances, a compound of the disclosure could be composed of entirely 2′O-Methyl, 2′ O-MOE, or 2′ F subunits. One embodiment of a compound of the disclosure is composed entirely of 2′O-methyl subunits.

### 6. 2′-O-[2-(N-methylcarbamoyl)ethyl] Oligomers (MCEs)

[0399] MCEs are another example of 2′O modified ribonucleotides useful in the compounds of the disclosure. Here, the 2′OH is derivatized to a 2-(N-methylcarbamoyl)ethyl moiety to increase nuclease resistance. A non-limiting example of an MCE oligomer comprising MCE subunits and phosphodiester internucleoside linkages is depicted below:

[chemical structure]

[0400] MCEs and their synthesis are described in Yamada et al., J. Org. Chem., 76(9):3042-53, which is hereby incorporated by reference in its entirety. Compounds of the disclosure may incorporate one or more MCE subunits.

### 7. Morpholino-Based Oligomers

[0401] Morpholino-based oligomers refer to an oligomer comprising morpholino subunits supporting a nucleobase and, instead of a ribose, contains a morpholinyl ring. Exemplary internucleoside linkages include, for example, phosphoramidate or phosphorodiamidate internucleoside linkages joining the morpholinyl ring nitrogen of one morpholino subunit to the 4′ exocyclic carbon of an adjacent morpholino subunit. Each morpholino subunit comprises a purine or pyrimidine nucleobase effective to bind, by base-specific hydrogen bonding, to a base in an oligonucleotide.

[0402] Morpholino-based oligomers (including modified antisense oligomers) are detailed, for example, in U.S. Pat. Nos. 5,698,685; 5,217,866; 5,142,047; 5,034,506; 5,166,315; 5,185,444; 5,521,063; 5,506,337 and pending U.S. patent application Ser. Nos. 12/271,036; 12/271,040; and PCT Publication No. WO/2009/064471 and WO/2012/043730 and Summerton et al. 1997, Antisense and Nucleic Acid Drug Development, 7, 187-195, which are hereby incorporated by reference in their entirety. The term “morpholino subunit,” is used herein as described in Summerton et al.

[0403] Within the oligomer structure, the phosphate groups are commonly referred to as forming the “internucleoside linkages” of the oligomer. The naturally occurring intemucleoside linkage of RNA and DNA is a 3′ to 5′ phosphodiester linkage. A “phosphoramidate” group comprises phosphorus having three attached oxygen atoms and one attached nitrogen atom, while a “phosphorodiamidate” group comprises phosphorus having two attached oxygen atoms and two attached nitrogen atoms. A “phosphorotriamidate” group (or a phosphoric acid triamide group) comprises phosphorus having one attached oxygen atom and three attached nitrogen atoms. In the uncharged or the cationic intemucleoside linkages of the morpholino-based oligomers described herein, one nitrogen is always pendant to the linkage chain. The second nitrogen, in a phosphorodiamidate linkage, is typically the ring nitrogen in a morpholino ring structure.

[0404] “PMO” refers to phosphorodiamidate morpholino-based oligomers having a phosphorus atom with (i) a covalent bond to the nitrogen atom of a morpholino ring and (ii) a second covalent bond to the nitrogen of a dimethylamino. “PMO-X” refers to phosphorodiamidate morpholino-based oligomers having a phosphorus atom with (i) a covalent bond to the nitrogen atom of a morpholino ring and (ii) a second covalent bond to the ring nitrogen of, for example, a 4-aminopiperdin-1-yl (i.e., APN) or a derivative of 4-aminopiperdin-1-yl. Exemplary PMO-X oligomers are disclosed in PCT Application No. PCT/US2011/38459 and PCT Publication No. WO 2013/074834, which are hereby incorporated by reference in their entirety. PMO-X includes “PMO-apn,” “PMO-APN” or “APN,” which refers to a PMO-X oligomer which comprises at least one internucleoside linkage where a phosphorus atom is linked to a morpholino group and to the ring nitrogen of a 4-aminopiperdin-1-yl (i.e., APN). In specific embodiments, a modified antisense oligomer comprising a targeting sequence as set forth in Tables 3 and 4 comprises at least one APN-containing linkage or APN derivative-containing linkage. Various embodiments include morpholino-based oligomers that have about 10%, 15%, 20%, 25%, 30%, 35%, 40%, 45%, 50%, 55%, 60%, 65%, 70%, 75%, 80%, 85%, 90%, 95%, or 100% APN/APN derivative-containing linkages, where the remaining linkages (if less than 100%) are uncharged linkages, e.g., about or at least about 1, 2, 3, 4, 5, 6, 7, 8, 9, 10, 11, 12, 13, 14, 15, 16, 17, 18, 19, 20, 21, 22, 23, 24, 25, 26, 27, 28, 29, 30, 31, 32, 33, 34, 35, 36, 37, 38, 39, 40, 41, 42, 43, 44, 45, 46, 47, 48, 49, or 50 of the total internucleoside linkages are APN/APN derivative-containing linkages.
[0405] In various embodiments, the modified antisense oligomer is a compound of formula (I):

[chemical structure]

[0406] or a pharmaceutically acceptable salt thereof, wherein:
[0407] each Nu is a nucleobase which taken together forms a targeting sequence;
[0408] Z is an integer from 8 to 48;
[0409] each Y is independently selected from 0 and —NR⁴, wherein each R⁴ is independently selected from H, C₁-C₆ alkyl, aralkyl, —C(═NH)NH₂, —C(O)(CH₂)ₙNR⁵C(═NH)NH₂, —C(O)(CH₂)₂NHC(O)(CH₂)₅NR⁵C(═NH)NH₂, and G, wherein R⁵ is selected from H and C₁-C₆ alkyl and n is an integer from 1 to 5;
[0410] T is selected from OH and a moiety of the formula:

[chemical structure]

[0411] wherein:
   [0412] A is selected from —OH, —N(R⁷)₂R⁸, wherein:
   [0413] each R⁷ is independently selected from H and C₁-C₆ alkyl, and
   [0414] R⁸ is selected from an electron pair and H, and
   [0415] R⁶ is selected from OH, —N(R⁹)CH₂C(O)NH₂, and a moiety of the formula:

[chemical structure]

[0416] wherein:
   [0417] R⁹ is selected from H and C₁-C₆ alkyl; and
   [0418] R¹⁰ is selected from G, —C(O)—R¹¹OH, acyl, trityl, 4-methoxytrityl, —C(═NH)NH₂, —C(O)(CH₂)ₘNR¹²C(═NH)NH₂, and —C(O)(CH₂)₂NHC(O)(CH₂)₅NR¹²C(═NH)NH₂, wherein:
   [0419] m is an integer from 1 to 5,
   [0420] R¹¹ is of the formula —(O-alkyl)_{y}- wherein y is an integer from 3 to 10 and each of they alkyl groups is independently selected from C₂-C₆ alkyl; and
   [0421] R¹² is selected from H and C₁-C₆ alkyl;
   [0422] each instance of R¹ is independently selected from:
   [0423] —N(R¹³)₂R¹⁴ wherein each R¹³ is independently selected from H and C₁-C₆ alkyl, and R¹⁴ is selected from an electron pair and H;
[0424] a moiety of formula (II):

[chemical structure]

[0425] wherein:
   [0426] R¹⁵ is selected from H, G, C₁-C₆ alkyl, —C(═NH)NH₂, —C(O)(CH₂)_{q}NR¹⁸C(═NH)NH₂, and —C(O)(CH₂)₂NHC(O)(CH₂)₅NR¹⁸C(═NH)NH₂, wherein:
   [0427] R¹⁸ is selected from H and C₁-C₆ alkyl; and
   [0428] q is an integer from 1 to 5,
[0429] R¹⁶ is selected from an electron pair and H; and
[0430] each R¹⁷ is independently selected from H and methyl; and
[0431] a moiety of formula (III):

[chemical structure]

[0432] wherein:
   [0433] R¹⁹ is selected from H, C₁-C₆ alkyl, —C(═NH)NH₂, —C(O)(CH₂)ᵣNR²²C(═NH)NH₂, —C(O)CH(NH₂)(CH₂)₃NHC(═NH)NH₂, —C(O)(CH₂)₂NHC(O)(CH₂)₅NR²²C(═NH)NH₂, —C(O)CH(NH₂)(CH₂)₄NH₂, and G
[0434] wherein:
   [0435] R²² is selected from H and C₁-C₆ alkyl; and
   [0436] r is an integer from 1 to 5,
[0437] R²⁰ is selected from H and C₁-C₆ alkyl; and
[0438] R²¹ is selected from an electron pair and H; and
[0439] R² is selected from H, G, acyl, trityl, 4-methoxytrityl, C₁-C₆ alkyl, —C(═NH)NH₂, —C(O)—R²³, —C(O)(CH₂)ₛNR²⁴C(═NH)NH₂, —C(O)(CH₂)₂NHC(O)(CH₂)₅NR²⁴C(═NH)NH₂, —C(O)CH(NH₂)(CH₂)₃NHC(═NH)N
[0440] H₂, and a moiety of the formula:

[chemical structure]

[0441] wherein,
[0442] R²³ is of the formula —(O-alkyl)ᵥ-OH, wherein v is an integer from 3 to 10 and each of the v alkyl groups is independently selected from C₂-C₆ alkyl; and
[0443] R²⁴ is selected from H and C₁-C₆ alkyl;
[0444] s is an integer from 1 to 5;
[0445] L is selected from —C(O)(CH₂)₆C(O)— and —C(O)(CH₂)₂S₂(CH₂)₂C(O)—; and
[0446] each R²⁵ is of the formula —(CH₂)₂OC(O)N(R²⁶)₂ wherein each R²⁶ is of the formula —(CH₂)₆NHC(═NH)NH₂, and

[0447] R³ is selected from an electron pair, H, and C₁-C₆ alkyl,
[0448] wherein G is a cell penetrating peptide (“CPP”) and linker moiety selected from —C(O)(CH₂)₅NH—CPP, —C(O)(CH₂)₂NH—CPP, —C(O)(CH₂)₂NHC(O)(CH₂)₅NH—CPP,
[0449] and —C(O)CH₂NH—CPP, or G is of the formula:

[chemical structure]

[0450] wherein the CPP is attached to the linker moiety by an amide bond at the CPP carboxy terminus, with the proviso that up to one instance of G is present.

[0451] In various embodiments, the targeting sequence is complementary to a target region within myostatin pre-mRNA. In some embodiments, the targeting sequence is complementary to 12 or more contiguous nucleotides in a target region entirely within exon 2 where no part of the targeting sequence spans a splice junction, or a region spanning an intron/exon or exon/intron splice junction (e.g., SEQ ID NOS: 2 to 3) of myostatin pre-mRNA.

[0452] In various embodiments, the targeting sequence is complementary to a target region within dystrophin pre-mRNA. In some embodiments, the targeting sequence is complementary to 10 or more contiguous nucleotides in a target region within an exon of dystrophin pre-mRNA selected from exon 7, exon 8, exon 9, exon 19, exon 23, exon 44, exon 45, exon 50, exon 51, exon 52, exon 53, or exon 55. In embodiments, the target region is entirely within an exon of dystrophin pre-mRNA where no part of the targeting sequence spans a splice junction, or a region spanning an intron/exon or exon/intron splice junction of dystrophin pre-mRNA.

[0453] In various embodiments, the myostatin targeting sequence comprises one of SEQ ID NOS: 16 to 75, is selected from one of SEQ ID NOS: 16 to 75, is a fragment of at least 12 contiguous nucleotides of a sequence selected from at least one of SEQ ID NOS: 16 to 75, or is a variant having at least 90% sequence identity to a sequence selected from at least one of SEQ ID NOS: 16 to 75, wherein each X is independently selected from uracil (U) or thymine (T), and wherein each Y is independently selected from cytosine (C) or 5-Methylcytosine (5 mC). In some embodiments, each X of SEQ ID NOS: 16 to 75 is thymine (T), and each Y of SEQ ID NOS: 16 to 75 is cytosine (C).

[0454] In some embodiments, the myostatin targeting sequence of formula (I) is selected from:

a)

SEQ ID NO: 71

(YYAGYYYAXYXXYXYYXGGXYYXGG) wherein Z is 25;
b)

SEQ ID NO: 72

(YAYXXAYYAGYYYAXYXXYXYYXGG) wherein Z is 25;
c)

SEQ ID NO: 73

(YYAYXXGYAXXAGAAAAXYAGY) wherein Z is 22;
d)

SEQ ID NO: 74

(GYATTAGAAAATYAGYTATAAATG) wherein Z is 24;
and
e)

SEQ ID NO: 75

(YYATYYGYTTGYATTAGAAAGTYAGY) wherein Z is 26;

[0455] wherein each X is independently selected from uracil (U) or thymine (T), and wherein each Y is independently selected from cytosine (C) or 5-Methylcytosine (5 mC). In some embodiments, each X of SEQ ID NOS: 71 to 75 is thymine (T), and each Y of SEQ ID NOS: 71 to 75 is cytosine (C).

[0456] In various embodiments, the dystrophin targeting sequence comprises one of SEQ ID NOS: 76 to 3485, is selected from one of SEQ ID NOS: 76 to 3485, is a fragment of at least 10 contiguous nucleotides of a sequence selected from at least one of SEQ ID NOS: 76 to 3485, or is a variant having at least 90% sequence identity to a sequence selected from at least one of SEQ ID NOS: 76 to 3485, wherein each X is independently selected from uracil (U) or thymine (T), and wherein each Y is independently selected from cytosine (C) or 5-Methylcytosine (5 mC). In some embodiments, each X of SEQ ID NOS: 76 to 3485 is thymine (T), and each Y of SEQ ID NOS: 76 to 3485 is cytosine (C). In some embodiments, a targeting sequence may comprise SEQ ID NO: 76.

[0457] In various embodiments, at least one X of the targeting sequence is T. In various embodiments, each X of the targeting sequence is T.

[0458] In various embodiments, at least one X of the targeting sequence is U. In various embodiments, each X of the targeting sequence is U.

[0459] In various embodiments, at least one Y of the targeting sequence is 5 mC. In various embodiments, each Y of the targeting sequence is 5 mC.

[0460] In various embodiments, at least one Y of the targeting sequence is C. In various embodiments, each Y of the targeting sequence is C.

[0461] In various embodiments, at least one X of SEQ ID NOS: 16 to 75 and SEQ ID NO: 76 to 3485 is T. In various embodiments, each X of SEQ ID NOS: 16 to 75 and SEQ ID NO: 76 to 3485 is T.

[0462] In various embodiments, at least one X of the targeting sequence is U. In various embodiments, each X of SEQ ID NOS: 16 to 75 and SEQ ID NO: 76 to 3485 is U.

[0463] In various embodiments, at least one Y of SEQ ID NOS: 16 to 75 and SEQ ID NO: 76 to 3485 is 5 mC. In various embodiments, each Y of SEQ ID NOS: 16 to 75 and SEQ ID NO: 76 to 3485 is 5 mC.

[0464] In various embodiments, at least one Y of SEQ ID NOS: 16 to 75 and SEQ ID NO: 76 to 3485 is C. In various embodiments, each Y of SEQ ID NOS: 16 to 75 and SEQ ID NO: 76 to 3485 is C.

[0465] In some embodiments, R³ is a moiety of the formula:

[chemical structure]

[0466] where L is selected from —C(O)(CH₂)₆C(O)— or —C(O)(CH₂)₂S₂(CH₂)₂C(O)—, and each R²⁵ is of the formula —(CH₂)₂OC(O)N(R²⁶)₂ wherein each R²⁶ is of the formula —(CH₂)₆NHC(═NH)NH₂. Such moieties are further described in U.S. Pat. No. 7,935,816, which is hereby incorporated by reference in its entirety.

[0467] In certain embodiments, R³ may comprise either moiety depicted below:

[chemical structure]

[0468] In various embodiments, each Y is O, R² is selected from H or G, R³ is selected from an electron pair or H. In some embodiments, R² is G wherein the CPP is of a sequence selected from SEQ ID NOS: 3486 to 3501. In certain embodiments, R² is H.

[0469] In certain embodiments, each R¹ is —N(CH₃)₂. In some embodiments, about 50-90% of the R¹ groups are dimethylamino (i.e. —N(CH₃)₂). In certain embodiments, about 70% to about 80% of the R¹ groups are dimethylamino. In certain embodiments about 75% of the R¹ groups are dimethylamino. In certain embodiments, about 66% of the R¹ groups are dimethylamino.

[0470] In some embodiments of the disclosure, R¹ may be selected from:

[chemical structure]

[0471] In certain embodiments, at least one R¹ is:

[chemical structure]

[0472] In certain embodiments, T is of the formula:

[chemical structure]

[0473] wherein A is —N(CH₃)₂, and R⁶ is of the formula:

[chemical structure]

[0474] wherein R¹⁰ is —C(O)R¹¹OH.

[0475] In some embodiments, each Y is O, and T is selected from:

[chemical structure]

[0476] In certain embodiments, T is of the formula:

[chemical structure]

[0477] In various embodiments, each Y is O, and R² is selected from H or G, R³ is selected from an electron pair or H. In some embodiments, R² is G, wherein the CPP is of a sequence selected from SEQ ID NOS: 3486 to 3501 described below.
[0478] In other embodiments, the modified antisense oligomer is a compound of formula (IV):

[chemical structure]

[0479] or a pharmaceutically acceptable salt thereof, where:
[0480] each Nu is a nucleobase which taken together forms a targeting sequence;
[0481] Z is an integer from 8 to 48;
[0482] each Y is independently selected from O and —NR⁴, wherein each R⁴ is independently selected from H, C₁-C₆ alkyl,
   aralkyl, —C(═NH)NH₂, —C(O)(CH₂)ₙNR⁵C(═NH)NH₂, —C(O)(CH₂)₂NHC(O)(CH₂)₅NR⁵C(═NH)NH₂, and G, wherein R⁵ is selected from H and C₁-C₆ alkyl and n is an integer from 1 to 5;

[0483] T is selected from OH and a moiety of the formula:

[chemical structure]

[0484] wherein:
[0485] A is selected from —OH and —N(R⁷)₂R⁸, wherein:
   [0486] each R⁷ is independently selected from H and C₁-C₆ alkyl, and
   [0487] R⁸ is selected from an electron pair and H, and
[0488] R⁶ is selected from OH, —N(R⁹)CH₂C(O)NH₂, and a moiety of the formula:

[chemical structure]

[0489] wherein:
   [0490] R⁹ is selected from H and C₁-C₆ alkyl; and
   [0491] R¹⁰ is selected from G, —C(O)—R¹¹OH, acyl, trityl, 4-methoxytrityl, —C(═NH)NH₂, —C(O)(CH₂)ₘNR¹²C(═NH)NH₂, and —C(O)(CH₂)₂NHC(O)(CH₂)₅NR¹²C(═NH)NH₂, wherein:
      [0492] m is an integer from 1 to 5,
      [0493] R¹¹ is of the formula —(O-alkyl)_{y}- wherein y is an integer from 3 to 10 and
         [0494] each of the y alkyl groups is independently selected from C₂-C₆ alkyl; and

[0495] R¹² is selected from H and C₁-C₆ alkyl;

[0496] R² is selected from H, G, acyl, trityl, 4-methoxytrityl, C₁-C₆ alkyl, —C(═NH)NH₂, and —C(O)—R²³; and

[0497] R³ is selected from an electron pair, H, and C₁-C₆ alkyl.

[0498] In various embodiments, the targeting sequence is complementary to a target region within myostatin pre-mRNA. In some embodiments, the targeting sequence is complementary to 12 or more contiguous nucleotides in a target region entirely within exon 2 where no part of the targeting sequence spans a splice junction, or a region spanning an intron/exon or exon/intron splice junction (e.g., SEQ ID NOS: 1 to 3) of myostatin pre-mRNA.

[0499] In various embodiments, the targeting sequence is complementary to a target region within dystrophin pre-mRNA. In some embodiments, the targeting sequence is complementary to 10 or more contiguous nucleotides in a target region within an exon of dystrophin pre-mRNA selected from exon 7, exon 8, exon 9, exon 19, exon 23, exon 44, exon 45, exon 50, exon 51, exon 52, exon 53, or exon 55. In embodiments, the target region is entirely within an exon of dystrophin pre-mRNA where no part of the targeting sequence spans a splice junction, or a region spanning an intron/exon or exon/intron splice junction (e.g., SEQ ID NOS: 76 to 3485) of dystrophin pre-mRNA.

[0500] In various embodiments, the myostatin targeting sequence comprises one of SEQ ID NOS: 4 to 15, is selected from one of SEQ ID NOS: 4 to 15, is a fragment of at least 12 contiguous nucleotides of a sequence selected from at least one of SEQ ID NOS: 4 to 15, or is a variant having at least 90% sequence identity to a sequence selected from at least one of SEQ ID NOS: 4 to 15, wherein each X is independently selected from uracil (U) or thymine (T), and wherein each Y is independently selected from cytosine (C) or 5-Methylcytosine (5 mC). In some embodiments, each X of SEQ ID NOS: 4 to 15 is thymine (T), and each Y of SEQ ID NOS: 4 to 15 is cytosine (C).
[0501] In some embodiments, the myostaton targeting sequence of formula (IV) is selected from:

a)

SEQ ID NO: 71

(YYAGYYYAXYXXYXYYXGGXYYXGG) wherein Z is 25;
b)

SEQ ID NO: 72

(YAYXXAYYAGYYYAXYXXYXYYXGG) wherein Z is 25;
c)

SEQ ID NO: 73

(YYAYXXGYAXXAGAAAAXYAGY) wherein Z is 22;
d)

SEQ ID NO: 74

(GYATTAGAAAATYAGYTATAAATG) wherein Z is 24;
and
e)

SEQ ID NO: 75

(YYATYYGYTTGYATTAGAAAGTYAGY) wherein Z is 26;

[0502] wherein each X is independently selected from uracil (U) or thymine (T), and wherein each Y is independently selected from cytosine (C) or 5-Methylcytosine (5 mC). In some embodiments, each X of SEQ ID NOS: 71 to 75 is thymine (T), and each Y of SEQ ID NOS: 71 to 75 is cytosine (C).

[0503] In various embodiments, the dystrophin targeting sequence comprises one of SEQ ID NOS: 76 to 3485, is selected from one of SEQ ID NOS: 76 to 3485, is a fragment of at least 10 contiguous nucleotides of a sequence selected from at least one of SEQ ID NOS: 76 to 3485, or is a variant having at least 90% sequence identity to a sequence selected from at least one of SEQ ID NOS: 76 to 3485, wherein each X is independently selected from uracil (U) or thymine (T), and wherein each Y is independently selected from cytosine (C) or 5-Methylcytosine (5 mC). In some embodiments, each X of SEQ ID NOS: 76 to 3485 is thymine (T), and each Y of SEQ ID NOS: 76 to 3485 is cytosine (C). In some embodiments, a targeting sequence may comprise SEQ ID NO: 76.

[0504] In various embodiments, Y is O, R² is selected from H or G, R³ is selected from an electron pair or H. In some embodiments, R² is G, wherein the CPP is of a sequence selected from SEQ ID NOS: 9-24. In certain embodiments, R² is H.

[0505] In some embodiments, Y is O, and T is selected from:

[chemical structure]

[0506] In some embodiments, T is of the formula:

[chemical structure]

[0507] R² is hydrogen; and R³ is an electron pair.
[0508] In other embodiments, the modified antisense oligomer is a compound of formula (V):

[chemical structure]

[0509] or a pharmaceutically acceptable salt thereof, wherein:
[0510] each Nu is a nucleobase which taken together forms a targeting sequence;
[0511] Z is an integer from 8 to 48;
[0512] each Y is independently selected from 0 and —NR⁴, wherein each R⁴ is independently selected from H, C₁-C₆ alkyl, aralkyl, —C(═NH)NH₂, —C(O)(CH₂)ₙNR⁵C(═NH)NH₂, —C(O)(CH₂)₂NHC(O)(CH₂)₅NR⁵C(═NH)NH₂, and G, wherein R⁵ is selected from H and C₁-C₆ alkyl and n is an integer from 1 to 5;
[0513] T is selected from OH and a moiety of the formula:

[chemical structure]

[0514] wherein:
[0515] A is selected from —OH, —N(R⁷)₂R⁸, wherein:
[0516] each R⁷ is independently selected from H and C₁-C₆ alkyl, and
[0517] R⁸ is selected from an electron pair and H, and
[0518] R⁶ is selected from OH, —N(R⁹)CH₂C(O)NH₂, and a moiety of the formula:

[chemical structure]

[0519] wherein:
[0520] R⁹ is selected from H and C₁-C₆ alkyl; and
[0521] R¹⁰ is selected from G, —C(O)—R¹¹OH, acyl, trityl, 4-methoxytrityl, —C(═NH)NH₂, —C(O)(CH₂)ₘNR¹²C(═NH)NH₂, and —C(O)(CH₂)₂NHC(O)(CH₂)₅NR¹²C(═NH)NH₂, wherein:
[0522] m is an integer from 1 to 5,
[0523] R¹¹ is of the formula —(O-alkyl)_{y}- wherein y is an integer from 3 to 10 and each of they alkyl groups is independently selected from C₂-C₆ alkyl; and
[0524] R¹² is selected from H and C₁-C₆ alkyl;
[0525] wherein G is a cell penetrating peptide (“CPP”) and linker moiety selected from —C(O)(CH₂)₅NH—CPP, —C(O)(CH₂)₂NH—CPP, —C(O)(CH₂)₂NHC(O)(CH₂)₅NH—CPP,

[0526] and —C(O)CH₂NH—CPP, or G is of the formula:

[chemical structure]

[0527] wherein the CPP is attached to the linker moiety by an amide bond at the CPP carboxy terminus, with the proviso that up to one instance of G is present.

[0528] In various embodiments, the targeting sequence is complementary to a target region within myostatin pre-mRNA. In some embodiments, the targeting sequence is complementary to 12 or more contiguous nucleotides in a target region entirely within exon 2 where no part of the targeting sequence spans a splice junction, or a region spanning an intron/exon or exon/intron splice junction (e.g., SEQ ID NOS: 1 to 3) of myostatin pre-mRNA.

[0529] In various embodiments, the targeting sequence is complementary to a target region within dystrophin pre-mRNA. In some embodiments, the targeting sequence is complementary to 10 or more contiguous nucleotides in a target region within an exon of dystrophin pre-mRNA selected from exon 7, exon 8, exon 9, exon 19, exon 23, exon 44, exon 45, exon 50, exon 51, exon 52, exon 53, or exon 55. In embodiments, the target region is entirely within an exon of dystrophin pre-mRNA where no part of the targeting sequence spans a splice junction, or a region spanning an intron/exon or exon/intron splice junction (e.g., SEQ ID NOS: 4 to 15) of dystrophin pre-mRNA.

[0530] In various embodiments, the myostatin targeting sequence comprises one of SEQ ID NOS: 16 to 75, is selected from one of SEQ ID NOS: 16 to 75, is a fragment of at least 12 contiguous nucleotides of a sequence selected from at least one of SEQ ID NOS: 16 to 75, or is a variant having at least 90% sequence identity to a sequence selected from at least one of SEQ ID NOS: 16 to 75, wherein each X is independently selected from uracil (U) or thymine (T), and wherein each Y is independently selected from cytosine (C) or 5-Methylcytosine (5 mC). In some embodiments, each X of SEQ ID NOS: 16 to 75 is thymine (T), and each Y of SEQ ID NOS: 16 to 75 is cytosine (C).
[0531] In some embodiments, the myostatin targeting sequence of formula (V) is selected from:

a)

SEQ ID NO: 71

(YYAGYYYAXYXXYXYYXGGXYYXGG) wherein Z is 25;
b)

SEQ ID NO: 72

(YAYXXAYYAGYYYAXYXXYXYYXGG) wherein Z is 25;
c)

SEQ ID NO: 73

(YYAYXXGYAXXAGAAAAXYAGY) wherein Z is 22;
d)

SEQ ID NO: 74

(GYATTAGAAAATYAGYTATAAATG) wherein Z is 24;
and
e)

SEQ ID NO: 75

(YYATYYGYTTGYATTAGAAAGTYAGY) wherein Z is 26;

[0532] wherein each X is independently selected from uracil (U) or thymine (T), and wherein each Y is independently selected from cytosine (C) or 5-Methylcytosine (5 mC). In some embodiments, each X of SEQ ID NOS: 71 to 75 is thymine (T), and each Y of SEQ ID NOS: 71 to 75 is cytosine (C).

[0533] In various embodiments, the dystrophin targeting sequence comprises one of SEQ ID NOS: 76 to 3485, is selected from one of SEQ ID NOS: 76 to 3485, is a fragment of at least 10 contiguous nucleotides of a sequence selected from at least one of SEQ ID NOS: 76 to 3485, or is a variant having at least 90% sequence identity to a sequence selected from at least one of SEQ ID NOS: 76 to 3485, wherein each X is independently selected from uracil (U) or thymine (T), and wherein each Y is independently selected from cytosine (C) or 5-Methylcytosine (5 mC). In some embodiments, each X of SEQ ID NOS: 76 to 3485 is thymine (T), and each Y of SEQ ID NOS: 76 to 3485 is cytosine (C). In some embodiments, a targeting sequence may comprise SEQ ID NO: 76.

[0534] In various embodiments, each Y is O, and T is selected from:

[chemical structure]

[0535] In some embodiments, T is of the formula:

[chemical structure]

[0536] In certain embodiments, the antisense oligomer of the disclosure is a compound of formula (VI):

[chemical structure]

[0537] or a pharmaceutically acceptable salt thereof, where:
[0538] each Nu is a nucleobase which taken together form a targeting sequence;
[0539] Z is an integer from 15 to 25;
[0540] each Y is O;
[0541] each R¹ is independently selected from:

[chemical structure]

[0542] In various embodiments, at least one R¹ is —N(CH₃)₂. In some embodiments, each R¹ is —N(CH₃)₂.

[0543] In various embodiments, the targeting sequence is complementary to a target region within myostatin pre-mRNA. In some embodiments, the targeting sequence is complementary to 12 or more contiguous nucleotides in a target region entirely within exon 2 where no part of the targeting sequence spans a splice junction, or a region spanning an intron/exon or exon/intron splice junction (e.g., SEQ ID NOS: 1 to 3) of myostatin pre-mRNA.

[0544] In various embodiments, the targeting sequence is complementary to a target region within dystrophin pre-mRNA. In some embodiments, the targeting sequence is complementary to 10 or more contiguous nucleotides in a target region within an exon of dystrophin pre-mRNA selected from exon 7, exon 8, exon 9, exon 19, exon 23, exon 44, exon 45, exon 50, exon 51, exon 52, exon 53, or exon 55. In embodiments, the target region is entirely within an exon of dystrophin pre-mRNA where no part of the targeting sequence spans a splice junction, or a region spanning an intron/exon or exon/intron splice junction (e.g., SEQ ID NOS: 4 to 15) of dystrophin pre-mRNA.

[0545] In various embodiments, the myostatin targeting sequence comprises one of SEQ ID NOS: 16 to 75, is selected from one of SEQ ID NOS: 16 to 75, is a fragment of at least 12 contiguous nucleotides of a sequence selected from at least one of SEQ ID NOS: 16 to 75, or is a variant having at least 90% sequence identity to a sequence selected from at least one of SEQ ID NOS: 16 to 75, wherein each X is independently selected from uracil (U) or thymine (T), and wherein each Y is independently selected from cytosine (C) or 5-Methylcytosine (5 mC). In some embodiments, each X of SEQ ID NOS: 16 to 75 is thymine (T), and each Y of SEQ ID NOS: 16 to 75 is cytosine (C).
[0546] In some embodiments, the myostatin targeting sequence of formula (VI) is selected from:

a)

SEQ ID NO: 71

(YYAGYYYAXYXXYXYYXGGXYYXGG) wherein Z is 25;
b)

SEQ ID NO: 72

(YAYXXAYYAGYYYAXYXXYXYYXGG) wherein Z is 25;
c)

SEQ ID NO: 73

(YYAYXXGYAXXAGAAAAXYAGY) wherein Z is 22;
d)

SEQ ID NO: 74

(GYATTAGAAAATYAGYTATAAATG) wherein Z is 24;
and
e)

SEQ ID NO: 75

(YYATYYGYTTGYATTAGAAAGTYAGY) wherein Z is 26;

[0547] wherein each X is independently selected from uracil (U) or thymine (T), and wherein each Y is independently selected from cytosine (C) or 5-Methylcytosine (5 mC). In some embodiments, each X of SEQ ID NOS: 71 to 75 is thymine (T), and each Y of SEQ ID NOS: 71 to 75 is cytosine (C).

[0548] In various embodiments, the dystrophin targeting sequence comprises one of SEQ ID NOS: 76 to 3485, is selected from one of SEQ ID NOS: 76 to 3485, is a fragment of at least 10 contiguous nucleotides of a sequence selected from at least one of SEQ ID NOS: 76 to 3485, or is a variant having at least 90% sequence identity to a sequence selected from at least one of SEQ ID NOS: 76 to 3485, wherein each X is independently selected from uracil (U) or thymine (T), and wherein each Y is independently selected from cytosine (C) or 5-Methylcytosine (5 mC). In some embodiments, each X of SEQ ID NOS: 76 to 3485 is thymine (T), and each Y of SEQ ID NOS: 76 to 3485 is cytosine (C). In some embodiments, a targeting sequence may comprise SEQ ID NO: 76.

[0549] In some embodiments, the antisense oligomer is a compound of formula (VII):

[chemical structure]

[0550] or a pharmaceutically acceptable salt thereof, where:
[0551] each Nu is a nucleobase which taken together form a targeting sequence; and
[0552] Z is an integer from 8 to 48;
[0553] each Y is O;
[0554] each R¹ is independently selected from:

[chemical structure]

[0555] R² is selected from H, acyl, trityl, 4-methoxytrityl, C₁-C₆ alkyl, —C(═NH)NH₂, and —C(O)—R²³; and
[0556] R³ is selected from an electron pair, H, and C₁-C₆ alkyl.

[0557] In various embodiments, the targeting sequence is complementary to a target region within myostatin pre-mRNA. In some embodiments, the targeting sequence is complementary to 12 or more contiguous nucleotides in a target region entirely within an exon of myostatin pre-mRNA or a region spanning an intron/exon or exon/intron splice junction (e.g., SEQ ID NOS: 1 to 3) of myostatin pre mRNA.

[0558] In various embodiments, the targeting sequence is complementary to a target region within dystrophin pre-mRNA. In some embodiments, the targeting sequence is complementary to 10 or more contiguous nucleotides in a target region within an exon of dystrophin pre-mRNA selected from exon 7, exon 8, exon 9, exon 19, exon 23, exon 44, exon 45, exon 50, exon 51, exon 52, exon 53, or exon 55. In embodiments, the target region is entirely within an exon of dystrophin pre-mRNA where no part of the targeting sequence spans a splice junction, or a region spanning an intron/exon or exon/intron splice junction (e.g., SEQ ID NOS: 4 to 15) of dystrophin pre-mRNA.

[0559] In various embodiments, the myostatin targeting sequence comprises one of SEQ ID NOS: 16 to 75, is selected from one of SEQ ID NOS: 16 to 75, is a fragment of at least 12 contiguous nucleotides of a sequence selected from at least one of SEQ ID NOS: 16 to 75, or is a variant having at least 90% sequence identity to a sequence selected from at least one of SEQ ID NOS: 16 to 75, wherein each X is independently selected from uracil (U) or thymine (T), and wherein each Y is independently selected from cytosine (C) or 5-Methylcytosine (5 mC). In some embodiments, each X of SEQ ID NOS: 16 to 75 is thymine (T), and each Y of SEQ ID NOS: 16 to 75 is cytosine (C).
[0560] In some embodiments, the myostatin targeting sequence of formula (VII) is selected from:

a)

SEQ ID NO: 71

(YYAGYYYAXYXXYXYYXGGXYYXGG) wherein Z is 25;
b)

SEQ ID NO: 72

(YAYXXAYYAGYYYAXYXXYXYYXGG) wherein Z is 25;
c)

SEQ ID NO: 73

(YYAYXXGYAXXAGAAAAXYAGY) wherein Z is 22;
d)

SEQ ID NO: 74

(GYATTAGAAAATYAGYTATAAATG) wherein Z is 24;
and
e)

SEQ ID NO: 75

(YYATYYGYTTGYATTAGAAAGTYAGY) wherein Z is 26;

[0561] wherein each X is independently selected from uracil (U) or thymine (T), and wherein each Y is independently selected from cytosine (C) or 5-Methylcytosine (5 mC). In some embodiments, each X of SEQ ID NOS: 71 to 75 is thymine (T), and each Y of SEQ ID NOS: 71 to 75 is cytosine (C).

[0562] In various embodiments, the dystrophin targeting sequence comprises one of SEQ ID NOS: 76 to 3485, is selected from one of SEQ ID NOS: 76 to 3485, is a fragment of at least 10 contiguous nucleotides of a sequence selected from at least one of SEQ ID NOS: 76 to 3485, or is a variant having at least 90% sequence identity to a sequence selected from at least one of SEQ ID NOS: 76 to 3485, wherein each X is independently selected from uracil (U) or thymine (T), and wherein each Y is independently selected from cytosine (C) or 5-Methylcytosine (5 mC). In some embodiments, each X of SEQ ID NOS: 76 to 3485 is thymine (T), and each Y of SEQ ID NOS: 76 to 3485 is cytosine (C). In some embodiments, a targeting sequence may comprise SEQ ID NO: 76.

[0563] In various embodiments, at least one X of the targeting sequence is T. In various embodiments, each X of the targeting sequence is T.

[0564] In various embodiments, at least one X of the targeting sequence is U. In various embodiments, each X of the targeting sequence is U.

[0565] In various embodiments, at least one Y of the targeting sequence is 5 mC. In various embodiments, each Y of the targeting sequence is 5 mC.

[0566] In various embodiments, at least one Y of the targeting sequence is C. In various embodiments, each Y of the targeting sequence is C.

[0567] In various embodiments, at least one X of SEQ ID NOS: 16 to 75 and SEQ ID NO: 76 to 3485 is T. In various embodiments, each X of SEQ ID NOS: 16 to 75 and SEQ ID NO: 76 to 3485 is T.

[0568] In various embodiments, at least one X of the targeting sequence is U. In various embodiments, each X of SEQ ID NOS: 16 to 75 and SEQ ID NO: 76 to 3485 is U.

[0569] In various embodiments, at least one Y of SEQ ID NOS: 16 to 75 and SEQ ID NO: 76 to 3485 is 5 mC. In various embodiments, each Y of SEQ ID NOS: 16 to 75 and SEQ ID NO: 76 to 3485 is 5 mC.

[0570] In various embodiments, at least one Y of SEQ ID NOS: 16 to 75 and SEQ ID NO: 76 to 3485 is C. In various embodiments, each Y of SEQ ID NOS: 16 to 75 and SEQ ID NO: 76 to 3485 is C.

[0571] In certain embodiments, the antisense oligomer is a compound of formula (VIII):

[chemical structure]

[0572] or a pharmaceutically acceptable salt thereof, where:
[0573] each Nu is a nucleobase which taken together form a targeting sequence; and
[0574] is an integer from 8 to 48.

[0575] In various embodiments, the targeting sequence is complementary to a target region within myostatin pre-mRNA. In some embodiments, the targeting sequence is complementary to 12 or more contiguous nucleotides in a target region within an exon/intron splice junction site, or a region spanning an intron/exon or exon/intron splice junction (e.g., SEQ ID NOS: 1 to 3) of myostatin pre mRNA.

[0576] In various embodiments, the targeting sequence is complementary to a target region within dystrophin pre-mRNA. In some embodiments, the targeting sequence is complementary to 10 or more contiguous nucleotides in a target region within an exon of dystrophin pre-mRNA selected from exon 7, exon 8, exon 9, exon 19, exon 23, exon 44, exon 45, exon 50, exon 51, exon 52, exon 53, or exon 55. In embodiments, the target region is entirely within an exon of dystrophin pre-mRNA where no part of the targeting sequence spans a splice junction, or a region spanning an intron/exon or exon/intron splice junction (e.g., SEQ ID NOS: 4 to 15) of dystrophin pre-mRNA.

[0577] In various embodiments, the myostatin targeting sequence comprises one of SEQ ID NOS: 16 to 75, is selected from one of SEQ ID NOS: 16 to 75, is a fragment of at least 12 contiguous nucleotides of a sequence selected from at least one of SEQ ID NOS: 16 to 75, or is a variant having at least 90% sequence identity to a sequence selected from at least one of SEQ ID NOS: 16 to 75, wherein each X is independently selected from uracil (U) or thymine (T), and wherein each Y is independently selected from cytosine (C) or 5-Methylcytosine (5 mC). In some embodiments, each X of SEQ ID NOS: 16 to 75 is thymine (T), and each Y of SEQ ID NOS: 16 to 75 is cytosine (C).

[0578] In some embodiments, the myostatin targeting sequence is selected from:

a)

SEQ ID NO: 71

(YYAGYYYAXYXXYXYYXGGXYYXGG) wherein Z is 25;
b)

SEQ ID NO: 72

(YAYXXAYYAGYYYAXYXXYXYYXGG) wherein Z is 25;
c)

SEQ ID NO: 73

(YYAYXXGYAXXAGAAAAXYAGY) wherein Z is 22;
d)

SEQ ID NO: 74

(GYATTAGAAAATYAGYTATAAATG) wherein Z is 24;
and
e)

SEQ ID NO: 75

(YYATYYGYTTGYATTAGAAAGTYAGY) wherein Z is 26;

[0579] wherein each X is independently selected from uracil (U) or thymine (T), and wherein each Y is independently selected from cytosine (C) or 5-Methylcytosine (5 mC). In some embodiments, each X of SEQ ID NOS: 71 to 75 is thymine (T), and each Y of SEQ ID NOS: 71 to 75 is cytosine (C).

[0580] In various embodiments, the dystrophin targeting sequence comprises one of SEQ ID NOS: 76 to 3485, is selected from one of SEQ ID NOS: 76 to 3485, is a fragment of at least 10 contiguous nucleotides of a sequence selected from at least one of SEQ ID NOS: 76 to 3485, or is a variant having at least 90% sequence identity to a sequence selected from at least one of SEQ ID NOS: 76 to 3485, wherein each X is independently selected from uracil (U) or thymine (T), and wherein each Y is independently selected from cytosine (C) or 5-Methylcytosine (5 mC). In some embodiments, each X of SEQ ID NOS: 76 to 3485 is thymine (T), and each Y of SEQ ID NOS: 76 to 3485 is cytosine (C). In some embodiments, a targeting sequence may comprise SEQ ID NO: 76.

[0581] In some embodiments, each Nu of the antisense oligomers of the disclosure, including compounds of formula (I), (IV), (V), (VI), (VII) and (VIII), is independently selected from adenine, guanine, thymine, uracil, cytosine, hypoxanthine (inosine), 2,6-diaminopurine, 5-methyl cytosine, C5-propynyl-modified pyrimidines, and 10-(9-(aminoethoxy)phenoxazinyl). In some embodiments, the targeting sequence of the antisense oligomers of the disclosure, including compounds of formula (I), (IV), (V), (VI), (VII) and (VIII), comprises a sequence selected from SEQ ID NOS: 2, 3, 4 or 6, is selected from SEQ ID NOS: 2, 3, 4 or 6, is a fragment of at least 12 contiguous nucleotides of a sequence selected from SEQ ID NOS: 2, 3, 4 or 6, or is a variant having at least 90% sequence identity to a sequence selected from SEQ ID NOS: 2, 3, 4 or 6, where X is selected from uracil (U) or thymine (T), and wherein I is inosine.

[0582] Additional modified antisense oligomers/chemistries that can be used in accordance with the present disclosure include those described in the following patents and patent publications, which are hereby incorporated by reference in their entirety: PCT Publication Nos. WO 2007/002390; WO 2010/120820; and WO 2010/148249; U.S. Pat. No. 7,838,657; and U.S. Patent Application No. 2011/0269820.

[0583] C. The Preparation of Morpholino Subunits and Phosphoramidate Internucleoside Linkers

[0584] Morpholino monomer subunits, the modified internucleoside linkages, and oligomers comprising the same can be prepared as described, for example, in U.S. Pat. Nos. 5,185,444, and 7,943,762, which are hereby incorporated by reference in their entirety. The morpholino subunits can be prepared according to the following general Reaction Scheme I.

[chemical structure]

[0585] Referring to Reaction Scheme 1, where B represents a base pairing moiety and PG represents a protecting group, the morpholino subunits may be prepared from the corresponding ribonucleoside (1) as shown. The morpholino subunit (2) may be optionally protected by reaction with a suitable protecting group precursor, for example trityl chloride. The 3′ protecting group is generally removed during solid-state oligomer synthesis as described in more detail below. The base pairing moiety may be suitably protected for sold phase oligomer synthesis. Suitable protecting groups include benzoyl for adenine and cytosine, phenylacetyl for guanine, and pivaloyloxymethyl for hypoxanthine (I). The pivaloyloxymethyl group can be introduced onto the N¹ position of the hypoxanthine heterocyclic base. Although an unprotected hypoxanthine subunit, may be employed, yields in activation reactions are far superior when the base is protected. Other suitable protecting groups include those disclosed in U.S. Pat. No. 8,076,476, which is hereby incorporated by reference in its entirety.

[0586] Reaction of compound 3 with the activated phosphorous compound 4, results in morpholino subunits having the desired linkage moiety compound 5. Compounds of structure 4 can be prepared using any number of methods known to those of skill in the art. For example, such compounds may be prepared by reaction of the corresponding amine and phosphorous oxychloride. In this regard, the amine starting material can be prepared using any method known in the art, for example those methods described in the Examples and in U.S. Pat. Nos. 5,185,444, 7,943,762, and 8,779,128, which are hereby incorporated by reference in its entirety.

[0587] Compounds of structure 5 can be used in solid-phase automated oligomer synthesis for preparation of oligomers comprising the internucleoside linkages. Such methods are well known in the art. Briefly, a compound of structure 5 may be modified at the 5′ end to contain a linker to a solid support. For example, compound 5 may be linked to a solid support by a linker comprising L11 and L15. Once supported, the protecting group (e.g., trityl) is removed and the free amine is reacted with an activated phosphorous moiety of a second compound of structure 5. This sequence is repeated until the desired length of oligo is obtained. The protecting group in the terminal 5′ end may either be removed or left on if a 5′-modification is desired. The oligo can be removed from the solid support using any number of methods, for example treatment with DTT followed by ammonium hydroxide.

[0588] The preparation of modified morpholino subunits and morpholino-based oligomers are described in more detail in the Examples. The morpholino-based oligomers containing any number of modified linkages may be prepared using methods described herein, methods known in the art and/or described by reference herein. Also described in the examples are global modifications of morpholino-based oligomers prepared as previously described (see e.g., PCT Publication No. WO 2008/036127, which is hereby incorporated by reference in its entirety).

[0589] The term “protecting group” refers to chemical moieties that block some or all reactive moieties of a compound and prevent such moieties from participating in chemical reactions until the protective group is removed, for example, those moieties listed and described in T.W. Greene, P.G.M. Wuts, Protective Groups in Organic Synthesis, 3rd ed. John Wiley & Sons (1999), which is hereby incorporated by reference in its entirety. It may be advantageous, where different protecting groups are employed, that each (different) protective group be removable by a different means. Protective groups that are cleaved under totally disparate reaction conditions allow differential removal of such protecting groups. For example, protective groups can be removed by acid, base, and hydrogenolysis. Groups such as trityl, dimethoxytrityl, acetal and tert-butyldimethylsilyl are acid labile and may be used to protect carboxy and hydroxy reactive moieties in the presence of amino groups protected with Cbz groups, which are removable by hydrogenolysis, and Fmoc groups, which are base labile. Carboxylic acid moieties may be blocked with base labile groups such as, without limitation, methyl, or ethyl, and hydroxy reactive moieties may be blocked with base labile groups such as acetyl in the presence of amines blocked with acid labile groups such as tert-butyl carbamate or with carbamates that are both acid and base stable but hydrolytically removable.

[0590] Carboxylic acid and hydroxyl reactive moieties may also be blocked with hydrolytically removable protective groups such as the benzyl group, while amine groups may be blocked with base labile groups such as Fmoc. A particularly useful amine protecting group for the synthesis of compounds of Formula (I) is the trifluoroacetamide. Carboxylic acid reactive moieties may be blocked with oxidatively-removable protective groups such as 2,4-dimethoxybenzyl, while co-existing amino groups may be blocked with fluoride labile silyl carbamates.

[0591] Allyl blocking groups are useful in the presence of acid- and base-protecting groups since the former are stable and can be subsequently removed by metal or pi-acid catalysts. For example, an allyl-blocked carboxylic acid can be deprotected with a palladium(0)-catalyzed reaction in the presence of acid labile t-butyl carbamate or base-labile acetate amine protecting groups. Yet another form of protecting group is a resin to which a compound or intermediate may be attached. As long as the residue is attached to the resin, that functional group is blocked and cannot react. Once released from the resin, the functional group is available to react.
[0592] Typical blocking/protecting groups are known in the art and include, but are not limited to the following moieties:

[chemical structure]

[0593] Unless otherwise noted, all chemicals were obtained from Sigma-Aldrich-Fluka (St. Louis, Mo.). Benzoyl adenosine, benzoyl cytidine, and phenylacetyl guanosine were obtained from Carbosynth Limited (Berkshire, UK).

[0594] Synthesis of PMO, PMOplus, PPMO, and PMO-X containing further linkage modifications as described herein was done using methods known in the art and described in pending U.S. patent application Ser. Nos. 12/271,036 and 12/271,040 and PCT Publication No. WO 2009/064471, which is hereby incorporated by reference in its entirety.

[0595] PMO with a 3′ trityl modification are synthesized essentially as described in PCT Publication No. WO 2009/064471 with the exception that the detritylation step is omitted.

[0596] D. Cell-Penetrating Peptides

[0597] The modified antisense oligomer compounds of the disclosure may be conjugated to a peptide, also referred to herein as a cell penetrating peptide (CPP). In certain preferred embodiments, the peptide is an arginine-rich peptide transport moiety effective to enhance transport of the compound into cells. The transport moiety is preferably attached to a terminus of the oligomer. The peptides have the capability of inducing cell penetration within 30%, 40%, 50%, 60%, 70%, 80%, 90% or 100% of cells of a given cell culture population, including all integers in between, and allow macromolecular translocation within multiple tissues in vivo upon systemic administration. In one embodiment, the cell-penetrating peptide may be an arginine-rich peptide transporter. In another embodiment, the cell-penetrating peptide may be Penetratin or the Tat peptide. These peptides are well known in the art and are disclosed, for example, in US Publication No. 2010-0016215 A1, which is hereby incorporated by reference in its entirety. One approach to conjugation of peptides to modified antisense oligomers of the disclosure can be found in PCT publication WO2012/150960, which is hereby incorporated by reference in its entirety. Some embodiments of a peptide conjugated oligomer of the present disclosure utilize glycine as the linker between the CPP and the modified antisense oligomer. For example, a peptide conjugated PMO of the disclosure consists of R₆-G-PMO.

[0598] The transport moieties as described above have been shown to greatly enhance cell entry of attached oligomers, relative to uptake of the oligomer in the absence of the attached transport moiety. Uptake is preferably enhanced at least ten fold, and more preferably twenty fold, relative to the unconjugated compound.

[0599] The use of arginine-rich peptide transporters (i.e., cell-penetrating peptides) are particularly useful in practicing the present disclosure. Certain peptide transporters have been shown to be highly effective at delivery of antisense compounds into primary cells including muscle cells (Marshall, Oda et al. 2007; Jearawiriyapaisarn, Moulton et al. 2008; Wu, Moulton et al. 2008, which are hereby incroporated by reference in their entirety). Furthermore, compared to other known peptide transporters such as Penetratin and the Tat peptide, the peptide transporters described herein, when conjugated to an antisense PMO, demonstrate an enhanced ability to alter splicing of several gene transcripts (Marshall, Oda et al. 2007, which is hereby incorporated by reference in its entirety).

[0600] Exemplary peptide transporters, excluding linkers are given below in Table 5.

TABLE 5
Exemplary peptide transporters

| | | CPP SEQ |
|---|---|---|
| NAME (DESIGNATION) | SEQUENCE | ID NO^{A} |
| rTAT | rrrqrrkkr | 3486 |
| Tat | rkkrrqrrr | 3487 |
| R₉F₂ | rrrrrrrrrff | 3488 |
| R₅F₂R₄ | rrrrrffrrrr | 3489 |
| R₄ | rrrr | 3490 |
| R₅ | rrrrr | 3491 |
| R₆ | rrrrrr | 3492 |
| R₇ | rrrrrrr | 3493 |
| R₈ | rrrrrrrr | 3494 |
| R₉ | rrrrrrrrr | 3495 |
| (RX)₈ | rahxrahxrahxrahxrahxrahxrahxrahx | 3496 |
| (RAhxR)₄; (P007) | rahxrrahxrrahxrrahxr | 3497 |
| (RAhxR)₅; (CP04057) | rahxrrahxrrahxrrahxrrahxr | 3498 |
| (RAhxRRBR)₂; (CP06062) | rahxrrbrrahxrrbr | 3499 |
| (RAR)₄F₂ | rarrarrarrarff | 3500 |
| (RGR)₄F₂ | rgrrgrrgrrgrff | 3501 |

^{A}Sequences assigned to CPP SEQ ID NOS do not include the linkage portion (e.g., C (cys), G (gly), P (pro), Ahx, B, AhxB where Ahx and B refer to 6-aminohexanoic acid and beta-alanine, respectively).

[0601] In various embodiments, G (as recited in formulas I, IV, and V) is a cell penetrating peptide (“CPP”) and linker moiety selected from —C(O)(CH₂)₅NH—CPP, —C(O)(CH₂)₂NH—CPP, —C(O)(CH₂)₂NHC(O)(CH₂)₅NH—CPP, and —C(O)CH₂NH—CPP, or G is of the formula:

[chemical structure]

[0602] wherein the CPP is attached to the linker moiety by an amide bond at the CPP carboxy terminus. In some embodiments, the CPP is selected from SEQ ID NOS: 3486 to 3501.

[0603] In some embodiments, G (as recited in formulas I, IV, and V) is of the formula:

[chemical structure]

[0604] wherein R^{a} is selected from H, acetyl, benzoyl, and stearoyl, and J is an integer from 4 to 9. In certain embodiments J is 6.
[0605] In some embodiments, the CPP (as recited in formulas I, IV, and V) is of the formula:

[chemical structure]

[0606] wherein R^{a} is selected from H, acetyl, benzoyl, and stearoyl, and J is an integer from 4 to 9. In certain embodiments, the CPP is SEQ ID NO: 15. In various embodiments, J is 6. In some embodiments Rₐ is selected from H and acetyl. For example, in some embodiments, Rₐ is H. In certain embodiments, Rₐ is acetyl.

### IV. FORMULATIONS

[0607] The compounds of the disclosure may also be admixed, encapsulated, conjugated or otherwise associated with other molecules, molecule structures or mixtures of compounds, as for example, liposomes, receptor-targeted molecules, oral, rectal, topical or other formulations, for assisting in uptake, distribution and/or absorption. Representative United States patents that teach the preparation of such uptake, distribution and/or absorption-assisting formulations include, but are not limited to, U.S. Pat. Nos. 5,108,921; 5,354,844; 5,416,016; 5,459,127; 5,521,291; 5,543,158; 5,547,932; 5,583,020; 5,591,721; 4,426,330; 4,534,899; 5,013,556; 5,108,921; 5,213,804; 5,227,170; 5,264,221; 5,356,633; 5,395,619; 5,416,016; 5,417,978; 5,462,854; 5,469,854; 5,512,295; 5,527,528; 5,534,259; 5,543,152; 5,556,948; 5,580,575; and 5,595,756, which are hereby incorporated by reference in their entirety.

[0608] The antisense compounds of the disclosure encompass any pharmaceutically acceptable salts, esters, or salts of such esters, or any other compound which, upon administration to an animal, including a human, is capable of providing (directly or indirectly) the biologically active metabolite or residue thereof. Accordingly, for example, the disclosure is also drawn to prodrugs and pharmaceutically acceptable salts of the compounds of the disclosure, pharmaceutically acceptable salts of such prodrugs, and other bioequivalents.

[0609] The term “prodrug” indicates a therapeutic agent that is prepared in an inactive form that is converted to an active form (i.e., drug) within the body or cells thereof by the action of endogenous enzymes or other chemicals and/or conditions. In particular, prodrug versions of the oligomers of the disclosure are prepared as SATE [(S-acetyl-2-thioethyl) phosphate] derivatives according to the methods disclosed in PCT Publication No. WO 1993/24510 to Gosselin et al., published Dec. 9, 1993 or in PCT Publication No. WO 1994/26764 and U.S. Pat. No. 5,770,713 to Imbach et al., which are hereby incorporated by reference in their entirety.

[0610] The term “pharmaceutically acceptable salts” refers to physiologically and pharmaceutically acceptable salts of the compounds of the disclosure: i.e., salts that retain the desired biological activity of the parent compound and do not impart undesired toxicological effects thereto. For oligomers, examples of pharmaceutically acceptable salts and their uses are further described in U.S. Pat. No. 6,287,860, which is hereby incorporated by reference in its entirety.

[0611] The present disclosure also includes pharmaceutical compositions and formulations which include the antisense compounds of the disclosure. The pharmaceutical compositions of the present disclosure may be administered in a number of ways depending upon whether local or systemic treatment is desired and upon the area to be treated. Administration may be topical (including ophthalmic and to mucous membranes including vaginal and rectal delivery), pulmonary, e.g., by inhalation or insufflation of powders or aerosols, including by nebulizer; intratracheal, intranasal, epidermal and transdermal), oral or parenteral. Parenteral administration includes intravenous, intraarterial, subcutaneous, intraperitoneal or intramuscular injection or infusion; or intracranial, e.g., intrathecal or intraventricular, administration. Oligomers with at least one 2′-O-methoxyethyl modification are believed to be particularly useful for oral administration. Pharmaceutical compositions and formulations for topical administration may include transdermal patches, ointments, lotions, creams, gels, drops, suppositories, sprays, liquids and powders. Conventional pharmaceutical carriers, aqueous, powder or oily bases, thickeners and the like may be necessary or desirable. Coated condoms, gloves and the like may also be useful.

[0612] The pharmaceutical formulations of the present disclosure, which may conveniently be presented in unit dosage form, may be prepared according to conventional techniques well known in the pharmaceutical industry. Such techniques include the step of bringing into association the active ingredients with the pharmaceutical carrier(s) or excipient(s). In general, the formulations are prepared by uniformly and intimately bringing into association the active ingredients with liquid carriers or finely divided solid carriers or both, and then, if necessary, shaping the product.

[0613] The compositions of the present disclosure may be formulated into any of many possible dosage forms such as, but not limited to, tablets, capsules, gel capsules, liquid syrups, soft gels, suppositories, and enemas. The compositions of the present disclosure may also be formulated as suspensions in aqueous, non-aqueous or mixed media. Aqueous suspensions may further contain substances which increase the viscosity of the suspension including, for example, sodium carboxymethylcellulose, sorbitol and/or dextran. The suspension may also contain stabilizers.

[0614] Pharmaceutical compositions of the present disclosure include, but are not limited to, solutions, emulsions, foams and liposome-containing formulations. The pharmaceutical compositions and formulations of the present disclosure may comprise one or more penetration enhancers, carriers, excipients or other active or inactive ingredients.

[0615] Emulsions are typically heterogeneous systems of one liquid dispersed in another in the form of droplets usually exceeding 0.1 μm in diameter. Emulsions may contain additional components in addition to the dispersed phases, and the active drug which may be present as a solution in either the aqueous phase, oily phase or itself as a separate phase. Microemulsions are included as an embodiment of the present disclosure. Emulsions and their uses are well known in the art and are further described in U.S. Pat. No. 6,287,860, which is hereby incorporated by reference in its entirety.

[0616] Formulations of the present disclosure include liposomal formulations. As used in the present disclosure, the term “liposome” means a vesicle composed of amphiphilic lipids arranged in a spherical bilayer or bilayers. Liposomes are unilamellar or multilamellar vesicles which have a membrane formed from a lipophilic material and an aqueous interior that contains the composition to be delivered. Cationic liposomes are positively charged liposomes which are believed to interact with negatively charged DNA molecules to form a stable complex. Liposomes that are pH-sensitive or negatively-charged are believed to entrap DNA rather than complex with it. Both cationic and noncationic liposomes have been used to deliver DNA to cells.

[0617] Liposomes also include “sterically stabilized” liposomes, a term which, as used herein, refers to liposomes comprising one or more specialized lipids that, when incorporated into liposomes, result in enhanced circulation lifetimes relative to liposomes lacking such specialized lipids. Examples of sterically stabilized liposomes are those in which part of the vesicle-forming lipid portion of the liposome comprises one or more glycolipids or is derivatized with one or more hydrophilic oligomers, such as a polyethylene glycol (PEG) moiety. Liposomes and their uses are further described in U.S. Pat. No. 6,287,860, which is hereby incorporated by reference in its entirety.

[0618] The pharmaceutical formulations and compositions of the present disclosure may also include surfactants. The use of surfactants in drug products, formulations and in emulsions is well known in the art. Surfactants and their uses are further described in U.S. Pat. No. 6,287,860, which is hereby incorporated by reference in its entirety.

[0619] In some embodiments, the present disclosure employs various penetration enhancers to effect the efficient delivery of nucleic acids, particularly oligomers. In addition to aiding the diffusion of non-lipophilic drugs across cell membranes, penetration enhancers also enhance the permeability of lipophilic drugs. Penetration enhancers may be classified as belonging to one of five broad categories, i.e., surfactants, fatty acids, bile salts, chelating agents, and non-chelating non-surfactants. Penetration enhancers and their uses are further described in U.S. Pat. No. 6,287,860, which is hereby incorporated by reference in its entirety.

[0620] One of skill in the art will recognize that formulations are routinely designed according to their intended use, i.e. route of administration.

[0621] Formulations for topical administration include those in which the oligomers of the disclosure are in admixture with a topical delivery agent such as lipids, liposomes, fatty acids, fatty acid esters, steroids, chelating agents and surfactants. Lipids and liposomes include neutral (e.g. dioleoylphosphatidyl DOPE ethanolamine, dimyristoylphosphatidyl choline DMPC, distearolyphosphatidyl choline) negative (e.g. dimyristoylphosphatidyl glycerol DMPG) and cationic (e.g. dioleoyltetramethylaminopropyl DOTAP and dioleoylphosphatidyl ethanolamine DOTMA).

[0622] For topical or other administration, therapeutics including oligomers of the disclosure may be encapsulated within liposomes or may form complexes thereto, in particular to cationic liposomes. Alternatively, therapeutics may be complexed to lipids, in particular to cationic lipids. Fatty acids and esters, pharmaceutically acceptable salts thereof, and their uses are further described in U.S. Pat. No. 6,287,860, which is hereby incorporated by reference in its entirety. Topical formulations are described in detail in U.S. patent application Ser. No. 09/315,298 filed on May 20, 1999 and Mourich et al., 2009, J. Invest. Dermatol., 129(8):1945-53, which are hereby incorporated by reference in their entirety.

[0623] Compositions and formulations for oral administration include powders or granules, microparticulates, nanoparticulates, suspensions or solutions in water or non-aqueous media, capsules, gel capsules, sachets, tablets or minitablets. Thickeners, flavoring agents, diluents, emulsifiers, dispersing aids or binders may be desirable. Oral formulations are those in which oligomers of the disclosure are administered in conjunction with one or more penetration enhancers surfactants and chelators. Surfactants include fatty acids and/or esters or salts thereof, bile acids and/or salts thereof. Bile acids/salts and fatty acids and their uses are further described in U.S. Pat. No. 6,287,860, which is hereby incorporated by reference in its entirety. In some embodiments, the present disclosure provides combinations of penetration enhancers, for example, fatty acids/salts in combination with bile acids/salts. An exemplary combination is the sodium salt of lauric acid, capric acid and UDCA. Further penetration enhancers include polyoxyethylene-9-lauryl ether, polyoxyethylene-20-cetyl ether. Oligomers of the disclosure may be delivered orally, in granular form including sprayed dried particles, or complexed to form micro or nanoparticles. Oligomer complexing agents and their uses are further described in U.S. Pat. No. 6,287,860, which is hereby incorporated by reference in its entirety. Oral formulations for oligomers and their preparation are described in detail in U.S. patent application Ser. No. 09/108,673 (filed Jul. 1, 1998), Ser. No. 09/315,298 (filed May 20, 1999) and Ser. No. 10/071,822 (filed Feb. 8, 2002), which are hereby incorporated by reference in their entirety.

[0624] Compositions and formulations for parenteral, intrathecal or intraventricular administration may include sterile aqueous solutions which may also contain buffers, diluents and other suitable additives such as, but not limited to, penetration enhancers, carrier compounds and other pharmaceutically acceptable carriers or excipients.

[0625] In another related embodiment, compositions of the disclosure may contain one or more antisense compounds, particularly oligomers, targeted to a first nucleic acid and one or more additional antisense compounds targeted to a second nucleic acid target. Alternatively, compositions of the disclosure may contain two or more antisense compounds targeted to different regions of the same nucleic acid target. Numerous examples of antisense compounds are known in the art. Two or more combined compounds may be used together or sequentially.

### V. METHODS OF USE

[0626] Certain aspects relate to methods of treating a subject having Duchenne muscular dystrophy or a related disorder comprising administering a dustrophin therapeutic to a subject also receiving a myostatin therapeutic.

[0627] In aspects, a therapeutic is administered to a subject having DMD or a related disorder. In embodiments, one or more therapeutic may be administered to the subject prior to treatment with a modified antisense oligomer as described herein. In embodiments, one or more therapeutic may be administered to the subject prior to, simultaneously or after administration of a modified antisense oligomer. In embodiments, a therapeutic is a protein or nucleic acid. In some embodiments, a protein is an antibody or a soluble receptor. In embodiments, a soluble receptor is ACVR2. In embodiments, a nucleic acid is an antisense oligomer or a siRNA. In some embodiments, an antisense oligomer is a modified antisense oligomer as described herein.

[0628] In embodiments, a therapeutic is a myostatin therapeutic capable of suppressing one or both of myostatin activity or myostatin expression in a subject. A myostatin therapeutic may be a therapeutic that targets myostatin pre-mRNA and interferes with transcription of the myostatin pre-mRNA to mature mRNA. In embodiments, a myostatin therapeutic is capable of inducing exon skipping during the processing of human myostatin pre-mRNA. In embodiments, a myostatin therapeutic induces skipping of exon 2 in myostatin pre-mRNA and inhibits the expression of exon 2 containing myostatin pre-mRNA. A myostatin therapeutic may be a therapeutic that targets myostatin protein and interferes with the myostatin protein binding with the myostatin receptor.

[0629] A myostatin therapeutic is selected from a protein and a nucleic acid. A protein may be an anti-myostatin antibody, for example anti-GDF8 (Abcam, Cambridge Mass.) or a soluble receptor. In embodiments, a soluble receptor is ACVR2. A nucleic acid is selected from an antisense oligomer and a siRNA. An antisense oligomer may be a modified myostatin antisense oligomer as described herein.

[0630] In embodiments, a therapeutic is a dystrophin therapeutic capable of increasing dystrophin in a subject. A dystrophin therapeutic may increase the expression of dystrophin or a truncated form of dystrophin that is functional or semi-functional. A truncated form of dystrophin includes, but is not limited to, micro-dystrophin and mini-dystrophin (disclosed in EP Patent no. 2125006, which is hereby incorporated by reference in its entirety). A dystrophin therapeutic may be a therapeutic that targets dystrophin pre-mRNA and modulates the transcription of the dystrophin pre-mRNA to mature mRNA. In embodiments, a dystrophin therapeutic is capable of inducing exon skipping during processing of human dystrophin pre-mRNA. In embodiments, a targeted dystrophin pre-mRNA has one or more genetic mutations. A dystrophin therapeutic induces exon skipping such that one or more exons containing one or more genetic mutations are removed from the dystrophin pre-mRNA during processing to mature mRNA. The resulting truncated mRNA is capable of translation into a functional or semi-functional dystrophin protein.

[0631] In some aspects, a modified dystrophin antisense oligomer comprises a nucleotide sequence of sufficient length and complementarity to specifically hybridize to a region within the pre-mRNA of the dystrophin gene, wherein binding of the modified antisense oligomer to the region induces exon skipping during processing of dystrophin pre-mRNA. In embodiments, exon skipping during processing of dystrophin pre-mRNA results in the removal of one or more exons having a genetic mutation from the pre-mRNA. In embodiments, the removal of one or more exons having a genetic mutation from the dystrophin pre-mRNA increases the level of non-mutated dystrophin pre-mRNA in a cell and/or tissue of the subject. The increase in the level of non-mutated dystrophin pre-mRNA in the subject may further translate to increased expression of functional or semi-functional dystrophin protein. Thus, the present disclosure relates to methods of increasing functional or semi-functional dystrophin protein by increasing the level of non-mutated dystrophin mRNA using the modified dystrophin antisense oligomers as described herein.

[0632] In some aspects, a modified myostatin antisense oligomer comprises a nucleotide sequence of sufficient length and complementarity to specifically hybridize to a region within the pre-mRNA of the myostatin gene, wherein binding of the modified antisense oligomer to the region induces exon skipping during processing of myostatin pre-mRNA. In embodiments, binding of the modified myostatin oligomer to the region decreases the level of exon 2-containing myostatin mRNA in a cell and/or tissue of the subject. The decrease in the level of exon 2-containing myostatin mRNA in the subject may further translate to decreased expression of functional myostatin protein.

[0633] Methods also include treating an individual afflicted with or at risk for developing Duchenne muscular dystrophy (DMD) or a related disorder, comprising administering an effective amount of a modified antisense oligomer of the disclosure to the subject in combination with a therapeutic agent. The modified antisense oligomer may or may not be in the same composition and may or may not be co-administered to a subject. In various embodiments, the modified antisense oligomer is administered at or near the same time as the therapeutic agent. In further embodiments, the modified antisense oligomer is administered at a substantially different time as the therapeutic agent. Exemplary sequences targeted by the modified antisense oligomers as described herein are shown in Tables 1 and 2.

[0634] Also included are therapeutics and modified antisense oligomers for treating DMD or related disorders or for use in the preparation of a medicament for the treatment of DMD or related disorders, the treatment or the medicament comprising a therapeutic. In embodiments, a medicament includes a modified antisense oligomer as described herein, e.g., where the modified antisense oligomer comprises 10 to 50 subunits, optionally having at least one subunit that is a nucleotide analog having (i) a modified internucleoside linkage, (ii) a modified sugar moiety, or (iii) a combination of the foregoing; and a targeting sequence complementary to 10 or more contiguous nucleotides in a target region within dystrophin or myostatin pre-mRNA.

[0635] In various embodiments, the targeting sequence is complementary to a target region within myostatin pre-mRNA. In some embodiments, the targeting sequence is complementary to 12 or more contiguous nucleotides in a target region entirely within exon 2 where no part of the targeting sequence spans a splice junction, or a region spanning an intron/exon or exon/intron splice junction (e.g., SEQ ID NOS: 1 to 3) of myostatin pre-mRNA. In some embodiments, the targeting sequence of the modified antisense oligomers (a) comprises a sequence selected from SEQ ID NOS: 16-75, (b) is selected from SEQ ID NOS: 16-75, (c) is a fragment of at least 12 contiguous nucleotides of a sequence selected from SEQ ID NOS: 16-75, or (d) is a variant having at least 90% sequence identity to a sequence selected from SEQ ID NOS: 16-75, where X is selected from uracil (U) or thymine (T), and C is selected from cytosine (C) or 5-methylcytosine (5 mC).

[0636] In various embodiments, the targeting sequence is complementary to a target region within dystrophin pre-mRNA. In some embodiments, the targeting sequence is complementary to 10 or more contiguous nucleotides in a target region within an exon of dystrophin pre-mRNA selected from exon 7, exon 8, exon 9, exon 19, exon 23, exon 44, exon 45, exon 50, exon 51, exon 52, exon 53, or exon 55. In embodiments, the target region is entirely within an exon of dystrophin pre-mRNA where no part of the targeting sequence spans a splice junction, or a region spanning an intron/exon or exon/intron splice junction (e.g., SEQ ID NOS: 4 to 15) of dystrophin pre-mRNA. In some embodiments, the targeting sequence of the modified antisense oligomers (a) comprises a sequence selected from SEQ ID NOS: 76-3485, (b) is selected from SEQ ID NOS: 76-3485, (c) is a fragment of at least 10 contiguous nucleotides of a sequence selected from SEQ ID NOS: 76-3485, or (d) is a variant having at least 90% sequence identity to a sequence selected from SEQ ID NOS: 76-3485, where X is selected from uracil (U) or thymine (T), and C is selected from cytosine (C) or 5-methylcytosine (5 mC).

[0637] In some embodiments, the methods of treating DMD or related disorders or the medicaments for the treatment of DMD or related disorders include modified antisense oligomers having a nucleotide analog subunit comprising a modified sugar moiety. The modified sugar moiety may be selected from a peptide nucleic acid (PNA) subunit, a locked nucleic acid (LNA) subunit, a 2′O,4′C-ethylene-bridged nucleic acid (ENA) subunit, a tricyclo-DNA (tc-DNA) subunit, a 2′ O-methyl subunit, a 2′ O-methoxyethyl subunit, a 2′-fluoro subunit, a 2′-O-[2-(N-methylcarbamoyl)ethyl]subunit, and a morpholino subunit.

[0638] These additional aspects and embodiments include modified antisense oligomers having a nucleotide analog subunit comprising a modified internucleoside linkage. In various embodiments, the modified internucleoside linkage is selected from a phosphorothioate internucleoside linkage, a phosphoramidate internucleoside linkage, a phosphorodiamidate internucleoside linkage. In further embodiments, the phosphorodiamidate internucleoside linkage comprises a phosphorous atom that is covalently bonded to a (1,4-piperazin)-1-yl moiety, a substituted (1,4-piperazin)-1-yl moiety, a 4-aminopiperidin-1-yl moiety, or a substituted 4-aminopiperidin-1-yl moiety.

[0639] These additional aspects and embodiments include modified antisense oligomers having a nucleotide analog subunit comprising at least one combination of a modified sugar moiety and a modified internucleoside linkage.

[0640] In some embodiments, the modified antisense oligomer is actively taken up by mammalian cells. In further embodiments, the modified antisense oligomer may be conjugated to a transport moiety (e.g., transport peptide or CPP) as described herein to facilitate such uptake. Various aspects relate to methods of decreasing the expression of exon 2-containing myostatin mRNA transcript and/or functional myostatin protein in a cell, tissue, and/or subject, using the modified antisense oligomers as described herein. In some instances, exon 2-containing myostatin mRNA transcript and/or functional myostatin protein is decreased or reduced by about or at least about 5%, 6%, 7%, 8%, 9%, 10%, 11%, 12%, 13%, 14%, 15%, 16%, 17%, 18%, 19%, 20%, 25%, 30%, 35%, 40%, 45%, 50%, 55%, 60%, 65%, 70%, 75%, 80%, 85%, 90%, 95%, or 100% relative to a control, for example, a control cell/subject (for example, a subject not having Duchenne muscular dystrophy or a related disorder), a control composition without the modified antisense oligomer, the absence of treatment, and/or an earlier time-point. Also included are methods of decreasing the expression of exon 2-containing mRNA transcript or functional myostatin protein relative to the levels of a healthy control, for example, a subject not having Duchenne muscular dystrophy or a related disorder. As used herein, an “effective amount” or “therapeutic amount” refers to the dose(s) of the modified antisense oligomers that is capable to bind to the target region of myostatin pre-mRNA transcript and to decrease the expression of exon 2-containing myostatin mRNA transcript and functional myostatin protein in the range of the percentages disclosed with regard to the increase when administered to a subject, as compared to a control cell/subject.

[0641] Various aspects relate to methods for modulating the splicing of intron and exons of dystrophin pre-mRNA and increasing the expression of dystrophin or truncated dystrophin pre-mRNA in a cell, tissue, and/or subject, using the modified antisense oligomers as described herein. In further aspects, expression of a truncated form of dystrophin pre-mRNA is enhanced, such as relative to full length wildtype dystrophin pre-mRNA. In some instances, dystrophin mRNA transcript and/or functional or semi-functional dystrophin protein is increased or enhanced by about or at least about 5%, 6%, 7%, 8%, 9%, 10%, 11%, 12%, 13%, 14%, 15%, 16%, 17%, 18%, 19%, 20%, 25%, 30%, 35%, 40%, 45%, 50%, 55%, 60%, 65%, 70%, 75%, 80%, 85%, 90%, 95%, or 100% relative to a control, for example, a control cell/subject (for example, a subject not having Duchenne muscular dystrophy or a related disorder), a control composition without the modified antisense oligomer, the absence of treatment, and/or an earlier time-point. The methods also include increasing the expression of dystrophin mRNA transcript or functional or semi-functional dystrophin protein relative to the levels of a healthy control, for example, a subject not having Duchenne muscular dystrophy or a related disorder. As used herein, an “effective amount” or “therapeutic amount” refers to the dose(s) of the modified antisense oligomers that is capable to bind to a target region of dystrophin pre-mRNA transcript and to increase the expression of dystrophin or truncated dystrophin mRNA transcript and functional dystrophin protein in the range of the percentages disclosed with regard to the increase when administered to a subject, as compared to a control cell/subject.

[0642] The methods also include decreasing expression of a functional/active myostatin protein in a cell, tissue, and/or subject, as described herein. In certain instances, the level of functional/active myostatin protein is decreased by about or at least about 5%, 6%, 7%, 8%, 9%, 10%, 11%, 12%, 13%, 14%, 15%, 16%, 17%, 18%, 19%, 20%, 25%, 30%, 35%, 40%, 45%, 50%, 55%, 60%, 65%, 70%, 75%, 80%, 85%, 90%, 95%, or 100% relative to a control, for example, a control cell/subject (for example, a subject having Duchenne muscular dystrophy or a related disorder), a control composition without the therapeutic, the absence of treatment, and/or an earlier time-point. The methods also include decreasing the expression of functional/active myostatin protein relative to the levels of an affected control, for example, a subject having Duchenne muscular dystrophy or a related disorder.

[0643] The methods also include increasing expression of a functional or semi-functional/active dystrophin protein in a cell, tissue, and/or subject, as described herein. In certain instances, the level of functional or semi-functional/active dystrophin protein is increased by about or at least about 5%, 6%, 7%, 8%, 9%, 10%, 11%, 12%, 13%, 14%, 15%, 16%, 17%, 18%, 19%, 20%, 25%, 30%, 35%, 40%, 45%, 50%, 55%, 60%, 65%, 70%, 75%, 80%, 85%, 90%, 95%, or 100% relative to a control, for example, a control cell/subject (for example, a subject not having Duchenne muscular dystrophy or a related disorder), a control composition without the therapeutic, the absence of treatment, and/or an earlier time-point. The methods also include increasing the expression of functional or semi-functional/active dystrophin protein relative to the levels of an affected control, for example, a subject having Duchenne muscular dystrophy or a related disorder.

[0644] The methods also include inhibiting the progression of Duchenne muscular dystrophy and related disorders in a subject using the therapeutics in combination with an antisense oligomer as described herein.

[0645] In some embodiments, the therapeutic and modified antisense oligomer are administered to a subject exhibiting one or more symptoms of DMD or a related disorder, in one or more suitable pharmaceutical carriers. As used herein, the term “treat” refers to an amelioration of DMD or a related disorder, or at least one discernible symptom related to DMD or a related disorder. In some embodiments, “treat” refers to an amelioration of at least one measurable physical and/or biological parameter that is not necessarily discernible by the subject. The subject may experience, for example, physical improvement of muscle strength and coordination. Those parameters may be assessed by e.g., self-evalulation tests, physician's examinations, lab tests for physical and physiological measurements, and biological tests of samples from the subject. In another embodiment, “treat” refers to slowing the progression or reversing the progression of DMD or a related disorder. As used herein, “prevent” or “inhibit” refers to delaying the onset or reducing the risk of developing DMD or a related disorder.

[0646] The methods include reducing, or improving, as appropriate, one or more symptoms of DMD and related disorders in a subject in need thereof. Particular examples include symptoms of progressive muscle weakness such as frequent falls, difficulty getting up from a lying or sitting position, trouble running and jumping, waddling gait, walking on the toes, large calf muscles, muscle pain and stiffness and learning disabilities.

[0647] The methods also include increasing skeletal muscle mass in a subject. The methods also include treating or preventing the decrease of muscle mass in a subject, in a healthy subject or a subject afflicted with a disease, disorder or condition. The methods also include treating skeletal muscle mass deficiency in a subject afflicted with a disease, disorder, or condition. In various embodiments, blood or tissue levels of one or both of myostatin and dystrophin protein are measured in a patient prior to administration of one or both of a therapeutic agent and an antisense oligomer described herein. An effective amount of one or both of a therapeutic agent and an antisense oligomer herein is administered to the subject. Blood or tissue levels of one or both of myostatin and dystrophin protein are measured in the subject after a select time and administration of the antisense oligomer. Optionally, the dosage and/or dosing schedule of one or both of a therapeutic agent and an antisense oligomer is adjusted according to the measurement, for example, to increase the dosage to ensure a therapeutic amount of one or both is present in the subject. A select time may include an amount of time after administration of one or both of a therapeutic agent and an antisense oligomer described herein, to allow time for absorption into the bloodstream and/or metabolization by the liver and other metabolic processes. In some embodiments, a select time may be about 1, 2, 3, 4, 5, 6, 7, 8, 9, 10, 11, 12, 15, 18, 20, 22, or 24 hours after administration. In some embodiments, a select time may be about 12, 18 or 24 hours after administration. In other embodiments, a select time may be about 1, 2, 3, 4, 5, 6 or 7 days after administration.

[0648] In conjunction with such treatment, pharmacogenomics (i.e., the study of the relationship between an individual's genotype and that individual's response to a foreign compound or drug) may be considered. Differences in metabolism of therapeutics can lead to severe toxicity or therapeutic failure by altering the relation between dose and blood concentration of the pharmacologically active drug. Thus, a physician or clinician may consider applying knowledge obtained in relevant pharmacogenomics studies in determining whether to administer a therapeutic agent as well as tailoring the dosage and/or therapeutic regimen of treatment with a therapeutic agent.

[0649] Effective administration and delivery of the therapeutic agent including a modified antisense oligomer to the target nucleic acid is a further aspect. Routes of therapeutic agent delivery include, but are not limited to, various systemic routes, including oral and parenteral routes, e.g., intravenous, subcutaneous, intraperitoneal, and intramuscular, as well as inhalation, transdermal and topical delivery. The appropriate route may be determined by one of skill in the art, as appropriate to the condition of the subject under treatment. Vascular or extravascular circulation, the blood or lymph system, and the cerebrospinal fluid are some non-limiting sites where the RNA may be introduced.

[0650] In particular embodiments, the therapeutic agent(s) are administered to the subject by intravenous (IV) or subcutaneous (SC), i.e., they are administered or delivered intravenously into a vein or subcutaneously into the fat layer between the skin and muscle. Non-limiting examples of intravenous injection sites include a vein of the arm, hand, leg, or foot. Non-limiting examples of subcutaneous injections sites include the abdomen, thigh, lower back or upper arm. In exemplary embodiments, a PMO, PMO-X, or PPMO forms of the modified antisense oligomer is administered by IV or SC. In other embodiments, the modified antisense oligomer(s) are administered to the subject by intramuscular (IM), e.g., they are administered or delivered intramuscularly into the deltoid muscle of the arm, the vastus lateralis muscle of the leg, the ventrogluteal muscles of the hips, the dorsogluteal muscles of the buttocks, the diaphragm and the intercostal muscles of the rib cage.

[0651] In certain embodiments, the therapeutic agents of the disclosure can be delivered by transdermal methods (e.g., via incorporation of the modified antisense oligomers into, e.g., emulsions, with such modified antisense oligomers optionally packaged into liposomes). Such transdermal and emulsion/liposome-mediated methods of delivery are described for delivery of modified antisense oligomers in the art, e.g., in U.S. Pat. No. 6,965,025, which are hereby incorporated by reference in their entirety.

[0652] The therapeutic agents described herein may also be delivered via an implantable device. Design of such a device is an art-recognized process, with, e.g., synthetic implant design described in, e.g., U.S. Pat. No. 6,969,400, which are hereby incorporated by reference in their entirety.

[0653] Therapeutic agents can be introduced into cells using art-recognized techniques (e.g., transfection, electroporation, fusion, liposomes, colloidal polymeric particles and viral and non-viral vectors as well as other means known in the art). The method of delivery selected will depend, for example, on the oligomer chemistry, the cells to be treated and the location of the cells and will be apparent to the skilled artisan. For instance, localization can be achieved by liposomes with specific markers on the surface to direct the liposome, direct injection into tissue containing target cells, specific receptor-mediated uptake, or the like.

[0654] As known in the art, therapeutic agents may be delivered using, e.g., methods involving liposome-mediated uptake, lipid conjugates, polylysine-mediated uptake, nanoparticle-mediated uptake, and receptor-mediated endocytosis, as well as additional non-endocytic modes of delivery, such as microinjection, permeabilization (e.g., streptolysin-O permeabilization, anionic peptide permeabilization), electroporation, and various non-invasive non-endocytic methods of delivery that are known in the art (refer to Dokka and Rojanasakul, Advanced Drug Delivery Reviews 44, 35-49 (2000), which is hereby incorporated by reference in its entirety).

[0655] The therapeutic agents may be administered in any convenient vehicle or carrier which is physiologically and/or pharmaceutically acceptable. Such a composition may include any of a variety of standard pharmaceutically acceptable carriers employed by those of ordinary skill in the art. Examples include, but are not limited to, saline, phosphate buffered saline (PBS), water, aqueous ethanol, emulsions, such as oil/water emulsions or triglyceride emulsions, tablets and capsules. The choice of suitable physiologically acceptable carrier will vary dependent upon the chosen mode of administration. “Pharmaceutically acceptable carrier” is intended to include any and all solvents, dispersion media, coatings, antibacterial and antifungal agents, isotonic and absorption delaying agents, and the like, compatible with pharmaceutical administration. The use of such media and agents for pharmaceutically active substances is well known in the art. Except insofar as any conventional media or agent is incompatible with the active compound, use thereof in the compositions is contemplated. Supplementary active compounds can also be incorporated into the compositions.

[0656] The modified antisense oligomers of the present disclosure may generally be utilized as the free acid or free base. Alternatively, the compounds of this disclosure may be used in the form of acid or base addition salts. Acid addition salts of the free amino compounds of the present disclosure may be prepared by methods well known in the art, and may be formed from organic and inorganic acids. Suitable organic acids include maleic, fumaric, benzoic, ascorbic, succinic, methanesulfonic, acetic, trifluoroacetic, oxalic, propionic, tartaric, salicylic, citric, gluconic, lactic, mandelic, cinnamic, aspartic, stearic, palmitic, glycolic, glutamic, and benzenesulfonic acids.

[0657] Suitable inorganic acids include hydrochloric, hydrobromic, sulfuric, phosphoric, and nitric acids. Base addition salts included those salts that form with the carboxylate anion and include salts formed with organic and inorganic cations such as those chosen from the alkali and alkaline earth metals (for example, lithium, sodium, potassium, magnesium, barium and calcium), as well as the ammonium ion and substituted derivatives thereof (for example, dibenzylammonium, benzylammonium, 2-hydroxyethylammonium, and the like). Thus, the term “pharmaceutically acceptable salt” is intended to encompass any and all acceptable salt forms.

[0658] In addition, prodrugs are also included within the context of this disclosure. Prodrugs are any covalently bonded carriers that release a compound in vivo when such prodrug is administered to a patient. Prodrugs are generally prepared by modifying functional groups in a way such that the modification is cleaved, either by routine manipulation or in vivo, yielding the parent compound. Prodrugs include, for example, compounds of this disclosure where hydroxy, amine or sulfhydryl groups are bonded to any group that, when administered to a patient, cleaves to form the hydroxy, amine or sulfhydryl groups. Thus, representative examples of prodrugs include (but are not limited to) acetate, formate and benzoate derivatives of alcohol and amine functional groups of the modified antisense oligomers of the disclosure. Further, in the case of a carboxylic acid (—COOH), esters may be employed, such as methyl esters, ethyl esters, and the like.

[0659] In some instances, liposomes may be employed to facilitate uptake of the modified antisense oligomer into cells (see, e.g., Williams, S. A., Leukemia 10(12):1980-1989, 1996; Lappalainen et al., Antiviral Res. 23:119, 1994; Uhlmann et al., modified antisense oligomers: a new therapeutic principle, Chemical Reviews, Volume 90, No. 4, 25 pages 544-584, 1990; Gregoriadis, G., Chapter 14, Liposomes, Drug Carriers in Biology and Medicine, pp. 287-341, Academic Press, 1979). Hydrogels may also be used as vehicles for modified antisense oligomer administration, for example, as described in PCT Publication No. WO 1993/01286. Alternatively, the oligomers may be administered in microspheres or microparticles. (See, e.g., Wu, G. Y. and Wu, C. H., J. Biol. Chem. 262:4429-4432, 30 1987). Alternatively, the use of gas-filled microbubbles complexed with the modified antisense oligomers can enhance delivery to target tissues, as described in U.S. Pat. No. 6,245,747. Sustained release compositions may also be used. These may include semipermeable polymeric matrices in the form of shaped articles such as films or microcapsules. Each such reference is hereby incorporated by reference in their entirety.

[0660] In some embodiments, the therapeutic agent is administered in an amount and manner effective to result in a peak blood concentration of at least 200-400 nM of therapeutic agent. Typically, one or more doses of therapeutic agent are administered, generally at regular intervals, for a period of about one to two weeks. Preferred doses for oral administration are from about 1-1000 mg oligomer per 70 kg. In some cases, doses of greater than 1000 mg oligomer/patient may be necessary. For i.v. administration, preferred doses are from about 0.5 mg to 1000 mg oligomer per 70 kg. The therapeutic agent may be administered at regular intervals for a short time period, e.g., daily for two weeks or less. However, in some cases the therapeutic agent is administered intermittently over a longer period of time. Administration may be followed by, or concurrent with, administration of an antibiotic or other therapeutic treatment. The treatment regimen may be adjusted (dose, frequency, route, etc.) as indicated, based on the results of immunoassays, other biochemical tests and physiological examination of the subject under treatment.

[0661] An effective in vivo treatment regimen using the therapeutic agents of the disclosure may vary according to the duration, dose, frequency and route of administration, as well as the condition of the subject under treatment (i.e., prophylactic administration versus administration in response to localized or systemic infection). Accordingly, such in vivo therapy will often require monitoring by tests appropriate to the particular type of disorder under treatment, and corresponding adjustments in the dose or treatment regimen, in order to achieve an optimal therapeutic outcome.

[0662] Treatment may be monitored, e.g., by general indicators of disease known in the art. The efficacy of an in vivo administered therapeutic agent may be determined from biological samples (tissue, blood, urine etc.) taken from a subject prior to, during and subsequent to administration of the therapeutic agent. Assays of such samples, wherein the therapeutic agent is a modified antisense oligomer, include (1) monitoring the presence or absence of heteroduplex formation with target and non-target sequences, using procedures known to those skilled in the art, e.g., an electrophoretic gel mobility assay; (2) monitoring the amount of an mRNA which does not comprise myostatin exon 2 in relation to a reference exon 2-containing myostatin mRNA; or (3) monitoring the amount of an mRNA which does not comprise dystrophin mRNA containing one or more exons having one or more genetic mutations in relation to a reference dystrophin mRNA containing one or more genetic mutations, as determined by standard techniques such as RT-PCR, northern blotting, ELISA or western blotting. In some embodiments, treatment is monitored by symptomatic assessments. Those assessments include, but not limited to, self-evalulation, physician's examinations, motor function tests (e.g., grip strength tests) including measurements of muscle size, muscle mass, strength, reflex, involuntary muscle movements, electrophysiology test, number of muscle fibers and fibers with centralized nuclei, and cardiovascular function tests including electrocardiogram (EKG or EGG).

[0663] In some embodiments, the methods described herein also include administration in combination with another therapeutic. The additional therapeutic may be administered prior, concurrently or non-concurrently, for example subsequently, to the administration of the therapeutic(s) of the present invention. For example, the therapeutic may be administered in combination with a steroid and/or an antibiotic. In another example, the patient has been treated with a corticosteroid (e.g., a stable dose of a corticosteroid for four to six, seven, eight, nine, 10, 11, 12, 13, 14, 15, 16, 17, 18, 19, 20, 21, 22, 23, or 24 or more weeks) prior to administration of eteplirsen. The steroid may be a glucocorticoid or prednisone. Glucocorticoids such as cortisol control carbohydrate, fat and protein metabolism, and are anti-inflammatory by preventing phospholipid release, decreasing eosinophil action and a number of other mechanisms. Mineralocorticoids such as aldosterone control electrolyte and water levels, mainly by promoting sodium retention in the kidney. Corticosteroids are a class of chemicals that includes steroid hormones naturally produced in the adrenal cortex of vertebrates and analogues of these hormones that are synthesized in laboratories. Corticosteroids are involved in a wide range of physiological processes, including stress response, immune response, and regulation of inflammation, carbohydrate metabolism, protein catabolism, blood electrolyte levels, and behavior. Corticosteroids include, but are not limited to, Betamethasone, Budesonide, Cortisone, Dexamethasone, Hydrocortisone, Methylprednisolone, Prednisolone, and Prednisone. One particular steroid of interest that may h administered prior, concurrently or subsequently to the administration of the composition of the present invention is deflazacort and formulations thereof (e.g., MP-104, Marathon Pharmaceuticals LLC).

[0664] In some embodiments, the dosage of a therapeutic (e.g., a therapeutic oligonucleotide, such as eteplirsen) is about 30 mg/kg over a period of time sufficient to treat DMD. In some embodiments, the therapeutic is administered to the patient at a dose of between about 25 mg/kg and about 50 mg/kg (e.g., about 25, 26, 27, 28, 29, 30, 31, 32, 33, 34, 35, 36, 37, 38, 39, 40, 41, 42, 43, 44, 45, 46, 47, 48, 49, or 50 mg/kg), once per week. In some embodiments, the therapeutic is administered to the patient at a dose of between about 25 mg/kg, and about 50 mg/kg (e.g., about 30 mg/kg to about 50 ng/kg, about 25 mg/kg to about 40 mg/kg, about 28 mg/kg to about 32 mg/kg, or about 30 mg/kg to about 40 mg/kg), e.g., once per week.

[0665] In some embodiments, the therapeutic is administered intravenously once a week. In certain embodiments, the time of infusion is from about 15 minutes to about 4 hours. In some embodiments, the time of infusion is from about 30 minutes to about 3 hours. In some embodiments, the time of infusion is from about 30 minutes to about 2 hours. In some embodiments, the time of infusion is from about 1 hour to about 2 hours. In some embodiments the time of infusion is from about 30 minutes to about 1 hour. In some embodiments, the time of infusion is about 60 minutes. In some embodiments, the time of infusion is 35 to 60 minutes.

### VI. DOSING

[0666] The formulation of therapeutic compositions and their subsequent administration (dosing) is believed to be within the skill of those in the art. Dosing is dependent on severity and responsiveness of the disease state to be treated, with the course of treatment lasting from several days to several months, or until a cure is effected or a diminution of the disease state is achieved. Optimal dosing schedules can be calculated from measurements of drug accumulation in the body of the patient. Persons of ordinary skill can easily determine optimum dosages, dosing methodologies and repetition rates. Optimum dosages may vary depending on the relative potency of individual oligomers, and can generally be estimated based on EC50s found to be effective in in vitro and in vivo animal models. In general, dosage is from 0.01 μg to 100 g per kg of body weight, and may be given once or more daily, weekly, monthly or yearly, or even once every 2 to 20 years. Persons of ordinary skill in the art can easily estimate repetition rates for dosing based on measured residence times and concentrations of the drug in bodily fluids or tissues. Following successful treatment, it may be desirable to have the patient undergo maintenance therapy to prevent the recurrence of the disease state, where the oligomer is administered in maintenance doses, ranging from 1-1000 mg oligomer per 70 kg of body weight for oral administration, or 0.5 mg to 1000 mg oligomer per 70 kg of body weight for i.v. administration, once or more daily, to once every 20 years.

[0667] While the present disclosure has been described with specificity in accordance with certain of its embodiments, the following examples serve only to illustrate the disclosure and are not intended to limit the same. Each of the references, patents, patent applications, GenBank accession numbers, and the like recited in the present application are hereby incorporated by reference in its entirety.

### VI. EXAMPLES

[0668] The following Examples may be used for illustrative purposes and should not be deemed to narrow the scope of the invention.

[0669] Modified antisense oligomers (illustrated in FIGS. 1A to 1G) of the disclosure were designed to bind to a target region within a dystrophin or myostatin pre-mRNA transcript and prepared using the following protocol:

[0670] Procedure a for the Preparation of Active Subunits:

[chemical structure]

[0671] To a stirred solution of 6 (1 eq) in dichloromethane was added POCl3 (1.1 eq), followed by diisopropylethylamine (3 eq) at 0° C., cooled by an ice-bath. After 15 minutes, the ice-bath was removed and the solution was allowed to warm to room temperature for one hour. Upon reaction completion, the reaction solution was diluted with dichloromethane, washed with 10% aqueous citric acid three times. After drying over MgSO4, the organic layer was passed through a plug of silica gel and concentrated in vacuo. The resulting phosphoroamidodichloride (4) was used directly for the next step without further purification.

[0672] To a solution of the phosphoroamidodichloride (4) (1 eq), 2,6-lutidine (1 eq) in dichloromethane was added Mo(Tr)T (7) (0.5 eq)/dichloromethane solution, followed by N-methylimidazole (0.2 eq). The reaction stirred at room temperature overnight. Upon reaction completion, the reaction solution was diluted with dichloromethane, and washed with 10% aqueous citric acid three times. After drying over MgSO₄, the organic layer was filtered, then concentrated. The product (8) was purified by silica gel chromatography (eluting with a gradient of ethyl acetate/hexanes), and then stored at −20° C. The structure was confirmed by LCMS analysis.

[0673] Procedure B for the Preparation of Activated Subunits:

[chemical structure]

[0674] To a solution of POCl₃ (l.leq) in dichloromethane was added 2,6-lutidine (2 eq), followed by dropwise addition of Mo(Tr)T (7) (leq)/dichloromethane solution at 0° C. After 1 hour, the reaction solution was diluted with dichloromethane, and quickly washed three times with 10% aqueous citric acid. The desired phosphodichloridate (9) was obtained after drying over MgSO₄ and evaporation of solvent.

[0675] To a solution of the phosphodichloridate (leq) in dichloromethane was added amine (leq)/dichloromethane dropwise to the solution at 0° C. After 15 minutes, the reaction mixture was allowed to warm to room temperature for about an hour. Upon reaction completion, the product (8) as a white solid was collected by precipitation with the addition of hexanes, followed by filtration. The product was stored at −20° C. after drying under vacuum. The structure was confirmed by LCMS analysis.

### Example 1: ((2S,6R)-6-(5-methyl-2,4-dioxo-3,4-dihydropyrimidin-1(2H)-yl)-4-tritylmorpholin-2-yl)methyl Phosphorodichloridate

[chemical structure]

[0677] To a cooled (ice/water bath) DCM solution (20 mL) of phosphorus oxychloride (2.12 mL, 22.7 mmol) was added dropwise 2,6-lutidine (4.82 mL, 41.4 mmol) then a DCM solution (20 mL) Mo(Tr)T (2) (10.0 g, 20.7 mmol) was added dropwise over 15 min (int. temp. 0-10° C.) then bath was removed a stirring continued at ambient temperature for 20 min. The reaction was washed with citric acid solution (40 mL×3, 10% w/v aq), dried (MgSO4), filtered and concentrated to a white foam (9.79 g) then used directly for the following procedure.

### Example 2: (6-(5-methyl-2,4-dioxo-3,4-dihydropyrimidin-1(2H)-yl)-4-tritylmorpholin-2-yl)methyl (4-(dimethylamino)piperidin-1-yl)phosphorochloridate

[chemical structure]

[0679] To a cooled (ice/water bath) DCM solution (5 mL) of the dichlorophosphate from example 1 (5.00 g, 5.00 mmol) was added a DCM solution (5 mL) of the piperidine (0.61 g, 4.76 mmol) dropwise then the bath was removed and stirring continued at ambient temperature for 30 min. The reaction was loaded directly onto a column. Chromatography with [SiO2 column (40 g), DCM/EtOH eluant (gradient 1:0 to 1:1)] afforded the title compound (2.5 g) as a white foam. ESI/MS calcd. for 1 (4 nitrophenyl)piperazine derivative C46H55N8O7P 862.4, found m/z=863.6 (M+1).

### Example 3: 1-(1-(chloro((6-(5-methyl-2,4-dioxo-3,4-dihydropyrimidin-1(2H)-yl)-4-tritylmorpholin-2-yl)methoxy)phosphoryl)piperidin-4-yl)-1-methylpyrrolidin-1-ium Chloride

[chemical structure]

[0681] The title compound was synthesized in a manner analogous to that described in Example 2 to afford the title compound (0.6 g) as a white solid. ESI/MS calcd. for 1-(4-nitrophenyl)piperazine derivative C₄₉H₆₀N₈O₇P 903.4, found m/z=903.7 (M+).

### Example 4: ((2S,6R)-6-(5-methyl-2,4-dioxo-3,4-dihydropyrimidin-1(2H)-yl)-4-tritylmorpholin-2-yl)methyl (4-methylpiperazin-1-yl)phosphorochloridate

[chemical structure]

[0683] To a cooled (ice/water bath) DCM solution (10 mL) of phosphorus oxychloride (1.02 mL, 11.0 mmol) was added dropwise 2,6-lutidine (3.49 mL, 29.9 mmol) then a DCM solution (10 mL) of methyl piperazine (1.00 g, 10.0 mmol) was added dropwise and stirring continued for 1 h. A DCM solution (10 mL) of Mo(Tr)T (2) (4.82, 10.0 mmol) and NMI (79 μL, 1.0 mmol) was added and stirred 4 h then loaded directly onto a column.

[0684] Chromatography with [SiO2 column (80 g), DCM/Acetone with 2% TEA eluant (gradient 1:0 to 0:1)] afforded the title compound (0.8 g) as a white foam. ESI/MS calcd. for 1-(4-nitrophenyl)piperazine derivative C43H48N708P 834.4, found m/z=835.5 (M+1).

### Example 5: ((2S,6R)-6-(5-methyl-2,4-dioxo-3,4-dihydropyrimidin-1(2H)-yl)-4-tritylmorpholin-2-yl)methyl (4-ethylpiperazin-1-yl)phosphorochloridate

[chemical structure]

[0686] The title compound was synthesized in a manner analogous to that described in Example 4 to afford the title compound (11.5 g) as a white foam. ESI/MS calcd. for 1-(4-nitrophenyl)piperazine derivative C45H53N8O7P 848.4, found m/z=849.7 (M+1).

### Example 6: ((2S,6R)-6-(6-benzamido-9H-purin-9-yl)-4-tritylmorpholin-2-yl)methyl (4-ethylpiperazin-1-yl)phosphorochloridate

[chemical structure]

[0688] The title compound was synthesized in a manner analogous to that described in Example 4 to afford the title compound (4.5 g) as a white foam. ESI/MS calcd. for 1-(4-nitrophenyl)piperazine derivative C52H56N11O6P 961.4, found m/z=962.8 (M+1).

### Example 7: ((2S,6R)-6-(5-methyl-2,4-dioxo-3,4-dihydropyrimidin-1(2H)-yl)-4-tritylmorpholin-2-yl)methyl (4-isopropylpiperazin-1-yl)phosphorochloridate

[chemical structure]

[0690] The title compound was synthesized in a manner analogous to that described in Example 4 to afford the title compound (3.5 g) as a white foam. ESI/MS calcd. for 1-(4-nitrophenyl)piperazine derivative C₄₆H₅₅N₈O₇P 862.4, found m/z=863.7 (M+1).

### Example 8: ((2S,6R)-6-(5-methyl-2,4-dioxo-3,4-dihydropyrimidin-1(2H)-yl)-4-tritylmorpholin-2-yl)methyl methyl(2-(2,2,2-trifluoroacetamido)ethyl)phosphoramidochloridate

[chemical structure]

[0692] The title compound was synthesized in a manner analogous to that described in Example 4 to afford the title compound (1.0 g) as a white foam. ESI/MS calcd. for 1-(4-nitrophenyl)piperazine derivative C₄₄H₄₈F₃N₈O₈P 904.3, found m/z=903.7 (M−1).

### Example 9: ((2S,6R)-6-(5-methyl-2,4-dioxo-3,4-dihydropyrimidin-1(2H)-yl)-4-tritylmorpholin-2-yl)methyl methyl(2-(2,2,2-trifluoro-N-methylacetamido)ethyl)phosphoramidochloridate

[chemical structure]

[0694] The title compound was synthesized in a manner analogous to that described in Example 4 to afford the title compound (1.8 g) as a white foam. ESI/MS calcd. for 1-(4-nitrophenyl)piperazine derivative C₄₅H₅₀F₃N₈O₈P 918.3, found m/z=1836.6 (2M+).

### Example 10: ((2S,6R)-6-(5-methyl-2,4-dioxo-3,4-dihydropyrimidin-1(2H)-yl)-4-tritylmorpholin-2-yl)methyl (4-(2,2,2-trifluoroacetamido)piperidin-1-yl)phosphorochloridate

[chemical structure]

[0696] To a cooled solution (ice/water bath) of phosphorus oxychloride (17.7 mL, 190 mmol) in DCM (190 mL) was added dropwise 2,6-lutidine (101 mL, 864 mmol) then Mo(Tr)T (2) (83.5 g, 173 mmol) portionwise over 15 min (int. temp. 0-10° C.) and stirred. After 30 min, the 4-aminopiperidine monotrifluoroacetamide (48.9 g, ˜190 mmol) was added dropwise over 15 min (int. temp. 0-8° C.) and stirred. After 1 h, DIPEA (50 mL) was added dropwise (int. temp. 0-10° C.) and stirred 1 h. The reaction was washed with citric acid solution (500 mL×3, 10% w/v aq), dried (MgSO4), filtered and concentrated to a viscous oil which was loaded directly onto a column. Chromatography with [SiO2 column (330 g), hexanes/EtOAc eluant (gradient 1:0 to 0:1)] afforded the title compound (91.3 g, 70% yield) as a white foam. ESI/MS calcd. for 1-(4-nitrophenyl)piperazine derivative C43H48N708P 930.9, found m/z=954.4 (M+Na).

[0697] Examples 11 through 14 were prepared via procedure A described above.

### Example 11: (6-(5-methyl-2,4-dioxo-3,4-dihydropyrimidin-1(2H)-yl)-4-tritylmorpholin-2-yl)methyl (4-(1-(2,2,2-trifluoroacetyl)piperidin-4-yl)piperazin-1-yl)phosphorochloridate

[chemical structure]

### Example 12: (6-(5-methyl-2,4-dioxo-3,4-dihydropyrimidin-1(2H)-yl)-4-tritylmorpholin-2-yl)methyl (4-morpholinopiperidine-1-yl)phosphorochloridate

[chemical structure]

### Example 13: (6-(5-methyl-2,4-dioxo-3,4-dihydropyrimidin-1(2H)-yl)-4-tritylmorpholin-2-yl)methyl bis(3-(2,2,2-trifluoroacetamido)propyl)phosphoramidochloridate

[chemical structure]

### Example 14: (6-(5-methyl-2,4-dioxo-3,4-dihydropyrimidin-1(2H)-yl)-4-tritylmorpholin-2-yl) methyl [1,4′-bipiperidin]-1′-ylphosphonochloridate

[chemical structure]

[0702] Examples 15 through 20 below were prepared via procedure B described above.

### Example 15: (6-(5-methyl-2,4-dioxo-3,4-dihydropyrimidin-1(2H)-yl)-4-tritylmorpholin-2-yl)methyl (4-(pyrimidin-2-yl)piperazin-1-yl)phosphorochloridate

[chemical structure]

### Example 16: (6-(5-methyl-2,4-dioxo-3,4-dihydropyrimidin-1(2H)-yl)-4-tritylmorpholin-2-yl)methyl (4-(2-(dimethylamino)ethyl)piperazin-1-yl)phosphorochloridate

[chemical structure]

### Example 17: (6-(5-methyl-2,4-dioxo-3,4-dihydropyrimidin-1(2H)-yl)-4-tritylmorpholin-2-yl)methyl (4-phenylpiperazin-1-yl)phosphorochloridate

[chemical structure]

### Example 18: (6-(5-methyl-2,4-dioxo-3,4-dihydropyrimidin-1(2H)-yl)-4-tritylmorpholin-2-yl)methyl (4-(2,2,2-trifluoro-N-methylacetamido)piperidin-1-yl)phosphorochloridate

[chemical structure]

### Example 19: (6-(5-methyl-2,4-dioxo-3,4-dihydropyrimidin-1(2H)-yl)-4-tritylmorpholin-2-yl)methyl methyl(3-(2,2,2-trifluoro-N-methylacetamido)propyl)phosphoramidochloridate

[chemical structure]

### Example 20: ((2S,6R)-6-(6-benzamido-9H-purin-9-yl)-4-tritylmorpholin-2-yl)methyl (4-(2,2,2-trifluoroacetamido)piperidin-1-yl)phosphonochloridate

[chemical structure]

### Example 21: (4-(pyrrolidin-1-yl)piperidin-1-yl)phosphonic Dichloride Hydrochloride

[0709] To a cooled (ice/water bath) solution of phosphorus oxychloride (5.70 mL, 55.6 mmol) in DCM (30 mL) was added 2,6-lutidine (19.4 mL, 167 mmol) and a DCM solution (30 mL) of 4-(1-pyrrolidinyl)-piperidine (8.58 g, 55.6 mmol) and stirred for 1 hour. The suspension was filtered and solid washed with excess diethyl ether to afford the title pyrrolidine (17.7 g, 91% yield) as a white solid. ESI/MS calcd. for 1-(4-nitrophenyl)piperazine derivative C₁₉H₃₀N₅O₄P 423.2, found m/z=422.2 (M−1).

[chemical structure]

### Example 22: ((2S,6R)-6-(5-methyl-2,4-dioxo-3,4-dihydropyrimidin-1(2H)-yl)-4-tritylmorpholin-2-yl)methyl (4-(pyrrolidin-1-yl)piperidin-1-yl)phosphonochloridate Hydrochloride

[chemical structure]

[0711] To a stirred, cooled (ice/water bath) solution of the dichlorophosphoramidate from Example 21 (17.7 g, 50.6 mmol) in DCM (100 mL) was added a DCM solution (100 mL) of Mo(Tr)T (2) (24.5 g, 50.6 mmol), 2,6-Lutidine (17.7 mL, 152 mmol), and 1-methylimidazole (0.401 mL, 5.06 mmol) dropwise over 10 minutes. The bath was allowed to warm to ambient temperature as suspension was stirred. After 6 hours, the suspension was poured onto diethyl ether (1 L), stirred 15 minutes, filtered and solid washed with additional ether to afford a white solid (45.4 g). The crude product was purified by chromatography [SiO₂ column (120 gram), DCM/MeOH eluant (gradient 1:0 to 6:4)], and the combined fractions were poured onto diethyl ether (2.5 L), stirred 15 min, filtered, and the resulting solid washed with additional ether to afford the title compound (23.1 g, 60% yield) as a white solid. ESI/MS calcd. for 1-(4-nitrophenyl)piperazine derivative C₄₈H₅₇N₈O₇P 888.4, found m/z=887.6 (M−1).

### Example 23

### Design and Manufacture of Modified Antisense Oligomers and Exemplary Modified Antisense Oligomers

[0712] Preparation of trityl piperazine phenyl carbamate 35 (FIG. 2A): To a cooled suspension of compound 11 in dichloromethane (6 mL/g 11) was added a solution of potassium carbonate (3.2 eq) in water (4 mL/g potassium carbonate). To this two-phase mixture was slowly added a solution of phenyl chloroformate (1.03 eq) in dichloromethane (2 g/g phenyl chloroformate). The reaction mixture was warmed to 20° C. Upon reaction completion (1-2 hr), the layers were separated. The organic layer was washed with water, and dried over anhydrous potassium carbonate. The product 35 was isolated by crystallization from acetonitrile.

[0713] Preparation of carbamate alcohol 36: Sodium hydride (1.2 eq) was suspended in 1-methyl-2-pyrrolidinone (32 mL/g sodium hydride). To this suspension were added triethylene glycol (10.0 eq) and compound 35 (1.0 eq). The resulting slurry was heated to 95° C. Upon reaction completion (1-2 hr), the mixture was cooled to 20° C. To this mixture was added 30% dichloromethane/methyl tert-butyl ether (v:v) and water. The product-containing organic layer was washed successively with aqueous NaOH, aqueous succinic acid, and saturated aqueous sodium chloride. The product 36 was isolated by crystallization from dichloromethane/methyl tert-butyl ether/heptane.

[0714] Preparation of Tail acid 37: To a solution of compound 36 in tetrahydrofuran (7 mL/g 36) was added succinic anhydride (2.0 eq) and DMAP (0.5 eq). The mixture was heated to 50° C. Upon reaction completion (5 hr), the mixture was cooled to 20° C. and adjusted to pH 8.5 with aqueous NaHCO₃. Methyl tert-butyl ether was added, and the product was extracted into the aqueous layer. Dichloromethane was added, and the mixture was adjusted to pH 3 with aqueous citric acid. The product-containing organic layer was washed with a mixture of pH=3 citrate buffer and saturated aqueous sodium chloride. This dichloromethane solution of 37 was used without isolation in the preparation of compound 38.

[0715] Preparation of 38: To the solution of compound 37 was added N-hydroxy-5-norbornene-2,3-dicarboxylic acid imide (HONB) (1.02 eq), 4-dimethylaminopyridine (DMAP) (0.34 eq), and then 1-(3-dimethylaminopropyl)-N′-ethylcarbodiimide hydrochloride (EDC) (1.1 eq). The mixture was heated to 55° C. Upon reaction completion (4-5 hr), the mixture was cooled to 20° C. and washed successively with 1:1 0.2 M citric acid/brine and brine. The dichloromethane solution underwent solvent exchange to acetone and then to N,N-dimethylformamide, and the product was isolated by precipitation from acetone/N,N-dimethylformamide into saturated aqueous sodium chloride. The crude product was reslurried several times in water to remove residual N,N-dimethylformamide and salts.

[0716] Introduction of the activated “Tail” onto the anchor-loaded resin was performed in dimethyl imidazolidinone (DMI) by the procedure used for incorporation of the subunits during solid phase synthesis.

[0717] Preparation of the Solid Support for Synthesis of morpholino-based oligomers: This procedure was performed in a silanized, jacketed peptide vessel (ChemGlass, NJ, USA) with a coarse porosity (40-60 μm) glass frit, overhead stirrer, and 3-way Teflon stopcock to allow N2 to bubble up through the frit or a vacuum extraction.

[0718] The resin treatment/wash steps in the following procedure consist of two basic operations: resin fluidization or stirrer bed reactor and solvent/solution extraction. For resin fluidization, the stopcock was positioned to allow N2 flow up through the frit and the specified resin treatment/wash was added to the reactor and allowed to permeate and completely wet the resin. Mixing was then started and the resin slurry mixed for the specified time. For solvent/solution extraction, mixing and N2 flow were stopped and the vacuum pump was started and then the stopcock was positioned to allow evacuation of resin treatment/wash to waste. All resin treatment/wash volumes were 15 mL/g of resin unless noted otherwise.

[0719] To aminomethylpolystyrene resin (100-200 mesh; ˜1.0 mmol/g load based on nitrogen substitution; 75 g, 1 eq, Polymer Labs, UK, part #1464-X799) in a silanized, jacketed peptide vessel was added 1-methyl-2-pyrrolidinone (NMP; 20 ml/g resin) and the resin was allowed to swell with mixing for 1-2 hr. Following evacuation of the swell solvent, the resin was washed with dichloromethane (2×1-2 min), 5% diisopropylethylamine in 25% isopropanol/dichloromethane (2×3-4 min) and dichloromethane (2×1-2 min). After evacuation of the final wash, the resin was treated with a solution of disulfide anchor 34 in 1-methyl-2-pyrrolidinone (0.17 M; 15 mL/g resin, ˜2.5 eq) and the resin/reagent mixture was heated at 45° C. for 60 hr. On reaction completion, heating was discontinued and the anchor solution was evacuated and the resin washed with 1-methyl-2-pyrrolidinone (4×3-4 min) and dichloromethane (6×1-2 min). The resin was treated with a solution of 10% (v/v) diethyl dicarbonate in dichloromethane (16 mL/g; 2×5-6 min) and then washed with dichloromethane (6×1-2 min). The resin 39 (FIG. 2B) was dried under a N₂ stream for 1-3 hr and then under vacuum to constant weight (±2%). Yield: 110-150% of the original resin weight.

[0720] Determination of the Loading of Aminomethylpolystyrene-disulfide resin: The loading of the resin (number of potentially available reactive sites) is determined by a spectrometric assay for the number of triphenylmethyl (trityl) groups per gram of resin.

[0721] A known weight of dried resin (25±3 mg) is transferred to a silanized 25 ml volumetric flask and ˜5 mL of 2% (v/v) trifluoroacetic acid in dichloromethane is added. The contents are mixed by gentle swirling and then allowed to stand for 30 min. The volume is brought up to 25 mL with additional 2% (v/v) trifluoroacetic acid in dichloromethane and the contents thoroughly mixed. Using a positive displacement pipette, an aliquot of the trityl-containing solution (500 μL) is transferred to a 10 mL volumetric flask and the volume brought up to 10 mL with methanesulfonic acid.

[0722] The trityl cation content in the final solution is measured by UV absorbance at 431.7 nm and the resin loading calculated in trityl groups per gram resin μmol/g) using the appropriate volumes, dilutions, extinction coefficient (ε: 41 μmol-1 cm-1) and resin weight. The assay is performed in triplicate and an average loading calculated.

[0723] The resin loading procedure in this example will provide resin with a loading of approximately 500 μmol/g. A loading of 300-400 in μmol/g was obtained if the disulfide anchor incorporation step is performed for 24 hr at room temperature.

[0724] Tail loading: Using the same setup and volumes as for the preparation of aminomethylpolystyrene-disulfide resin, the Tail can be introduced into solid support. The anchor loaded resin was first deprotected under acidic condition and the resulting material neutralized before coupling. For the coupling step, a solution of 38 (0.2 M) in DMI containing 4-ethylmorpholine (NEM, 0.4 M) was used instead of the disulfide anchor solution. After 2 hr at 45° C., the resin 39 was washed twice with 5% diisopropylethylamine in 25% isopropanol/dichloromethane and once with DCM. To the resin was added a solution of benzoic anhydride (0.4 M) and NEM (0.4 M). After 25 min, the reactor jacket was cooled to room temperature, and the resin washed twice with 5% diisopropylethylamine in 25% isopropanol/dichloromethane and eight times with DCM. The resin 40 was filtered and dried under high vacuum. The loading for resin 40 is defined to be the loading of the original aminomethylpolystyrene-disulfide resin 39 used in the Tail loading.

[0725] Solid Phase Synthesis: morpholino-based oligomers were prepared on a Gilson AMS-422 Automated Peptide Synthesizer in 2 mL Gilson polypropylene reaction columns (Part #3980270). An aluminum block with channels for water flow was placed around the columns as they sat on the synthesizer. The AMS-422 will alternatively add reagent/wash solutions, hold for a specified time, and evacuate the columns using vacuum.

[0726] For oligomers in the range up to about 25 subunits in length, aminomethylpolystyrene-disulfide resin with loading near 500 μmol/g of resin is preferred. For larger oligomers, aminomethylpolystyrene-disulfide resin with loading of 300-400 μmol/g of resin is preferred. If a molecule with 5′-Tail is desired, resin that has been loaded with Tail is chosen with the same loading guidelines.

[0727] The following reagent solutions were prepared:

[0728] Detritylation Solution: 10% Cyanoacetic Acid (w/v) in 4:1 dichloromethane/acetonitrile; Neutralization Solution: 5% Diisopropylethylamine in 3:1 dichloromethane/isopropanol; Coupling Solution: 0.18 M (or 0.24 M for oligomers having grown longer than 20 subunits) activated morpholino subunit of the desired base and linkage type and 0.4 M N ethylmorpholine, in 1,3-dimethylimidazolidinone. Dichloromethane (DCM) was used as a transitional wash separating the different reagent solution washes.

[0729] On the synthesizer, with the block set to 42° C., to each column containing 30 mg of aminomethylpolystyrene-disulfide resin (or Tail resin) was added 2 mL of 1-methyl-2-pyrrolidinone and allowed to sit at room temperature for 30 min. After washing with 2 times 2 mL of dichloromethane, the following synthesis cycle was employed:

TABLE 6
Synthesis Cycle for Modified Antisense Oligomers

| Step | Volume | | Delivery | Hold time |
|---|---|---|---|---|
| Detritylation | 1.5 | mL | Manifold | 15 sec. |
| Detritylation | 1.5 | mL | Manifold | 15 sec. |
| Detritylation | 1.5 | mL | Manifold | 15 sec. |
| Detritylation | 1.5 | mL | Manifold | 15 sec. |
| Detritylation | 1.5 | mL | Manifold | 15 sec. |
| Detritylation | 1.5 | mL | Manifold | 15 sec. |
| Detritylation | 1.5 | mL | Manifold | 15 sec. |
| DCM | 1.5 | mL | Manifold | 30 sec. |
| Neutralization | 1.5 | mL | Manifold | 30 sec. |
| Neutralization | 1.5 | mL | Manifold | 30 sec. |
| Neutralization | 1.5 | mL | Manifold | 30 sec. |
| Neutralization | 1.5 | mL | Manifold | 30 sec. |
| Neutralization | 1.5 | mL | Manifold | 30 sec. |
| Neutralization | 1.5 | mL | Manifold | 30 sec. |
| DCM | 1.5 | mL | Manifold | 30 sec. |
| Coupling | 350-500 | uL | Syringe | 40 min. |
| DCM | 1.5 | mL | Manifold | 30 sec. |
| Neutralization | 1.5 | mL | Manifold | 30 sec. |
| Neutralization | 1.5 | mL | Manifold | 30 sec. |
| DCM | 1.5 | mL | Manifold | 30 sec. |
| DCM | 1.5 | mL | Manifold | 30 sec. |
| DCM | 1.5 | mL | Manifold | 30 sec. |

[0730] The sequences of the individual oligomers were programmed into the synthesizer so that each column receives the proper coupling solution (A,C,G,T,I) in the proper sequence. When the oligomer in a column had completed incorporation of its final subunit, the column was removed from the block and a final cycle performed manually with a coupling solution comprised of 4-methoxytriphenylmethyl chloride (0.32 M in DMO containing 0.89 M 4-ethylmorpholine.

[0731] Cleavage from the resin and removal of bases and protecting groups: After methoxytritylation, the resin was washed 8 times with 2 mL 1-methyl-2-pyrrolidinone. One mL of a cleavage solution comprising 0.1 M 1,4-dithiothreitol (DTT) and 0.73 M triethylamine in 1-methyl-2-pyrrolidinone was added, the column capped, and allowed to sit at room temperature for 30 min. After that time, the solution was drained into a 12 mL Wheaton vial. The greatly shrunken resin was washed twice with 300 μl of cleavage solution. To the solution was added 4.0 mL conc. Aqueous ammonia (stored at −20° C.), the vial capped tightly (with Teflon lined screw cap), and the mixture swirled to mix the solution. The vial was placed in a 45° C. oven for 16-24 hr to effect cleavage of base and protecting groups.

[0732] Crude product purification: The vialed ammonolysis solution was removed from the oven and allowed to cool to room temperature. The solution was diluted with 20 mL of 0.28% aqueous ammonia and passed through a 2.5×10 cm column containing Macroprep HQ resin (BioRad). A salt gradient (A: 0.28% ammonia with B: 1 M sodium chloride in 0.28% ammonia; 0-100% B in 60 min) was used to elute the methoxytrityl containing peak. The combined fractions were pooled and further processed depending on the desired product.

[0733] Demethoxytritylation of morpholino-based oligomers: The pooled fractions from the Macroprep purification were treated with 1 M H3PO4 to lower the pH to 2.5. After initial mixing, the samples sat at room temperature for 4 min, at which time they are neutralized to pH 10-11 with 2.8% ammonia/water. The products were purified by solid phase extraction (SPE).

[0734] SPE column packing and conditioning: Amberchrome CG-300M (Rohm and Haas; Philadelphia, Pa.) (3 mL) is packed into 20 mL fritted columns (BioRad Econo-Pac Chromatography Columns (732-1011)) and the resin rinsed with 3 mL of the following: 0.28% NH₄OH/80% acetonitrile; 0.5M NaOH/20% ethanol; water; 50 mM H3PO4/80% acetonitrile; water; 0.5 NaOH/20% ethanol; water; 0.28% NH₄OH.

[0735] SPE purification: The solution from the demethoxytritylation was loaded onto the column and the resin rinsed three times with 3-6 mL 0.28% aqueous ammonia. A Wheaton vial (12 mL) was placed under the column and the product eluted by two washes with 2 mL of 45% acetonitrile in 0.28% aqueous ammonia.

[0736] Product isolation: The solutions were frozen in dry ice and the vials placed in a freeze dryer to produce a fluffy white powder. The samples were dissolved in water, filtered through a 0.22 micron filter (Pall Life Sciences, Acrodisc 25 mm syringe filter, with a 0.2 micron HT Tuffryn membrane) using a syringe and the Optical Density (OD) was measured on a UV spectrophotometer to determine the OD units of oligomer present, as well as dispense sample for analysis. The solutions were then placed back in Wheaton vials for lyophilization.

[0737] Analysis of morpholino-based oligomers by MALDI: MALDI-TOF mass spectrometry was used to determine the composition of fractions in purifications as well as provide evidence for identity (molecular weight) of the oligomers. Samples were run following dilution with solution of 3,5-dimethoxy-4-hydroxycinnamic acid (sinapinic acid), 3,4,5-trihydoxyacetophenone (THAP) or alpha-cyano-4-hydoxycinnamic acid (HCCA) as matrices.

### Example 24 In Vivo Screening of PMO Myostatin Sequences

[0738] PMO sequences designed to skip myostatin exon 2 were screened. The efficacy of the PMO sequences was tested in vitro in both human Rhabdomyosarcoma (RD) and murine myoblast (normal—C2C12 and dystrophic—H2Kbmdx) cells. Four human-specific PMOs targeting the 5′ end of myostatin exon 2 were subsequently screened in RD cells.

[0739] PMOs were transfected by Nucleofection (Neon transfection system, Life technologies, Carlsbad, Calif.) following the manufacturer's standard protocol. Skipping efficiency of PMOs was evaluated by semi-quantitative RT-PCRs following densitometric analysis of gel electrophoresis results of RT-PCR products as a percentage of the density of skipped products against the total density of skipped and unskipped products. The sequences are listed in Table 7.

[0740] Sequences PMO 39, SEQ ID NO: 48, PMO 42, SEQ ID NO: 16, PMO 43, SEQ ID NO: 49, PMO 44, SEQ ID NO: 17, PMO 45, SEQ ID NO: 18, and PMO 124 were designed to bind both murine and human myostatin exon 2. PMOs were tested in triplicate at 4 doses (0.25, 0.5, 1, 2 μM). Myostatin exon 2 skipping efficiency was evaluated by RT-PCR (FIG. 3A) and densitometric analysis of the RT-PCR products as described above as a percentage of the intensity of skipped products against the total intensity of skipped and unskipped products. Statistical analysis was performed by one-way ANOVA for individual dose comparing the efficiency of the PMOs with that of PMO 28, (synthesized by GeneTools) which was demonstrated as an effective PMO to skip myostatin exon 2 (FIG. 3B).

[0741] Four (4) human specific PMOs (PMO 40, PMO 46, SEQ ID NO: 21, PMO 47, SEQ ID NO: 20, PMO 48, SEQ ID NO: 19) were analysed that were all designed to bind the 5′ end of human myostatin exon 2. PMOs were tested in triplicate at 1 μM dose and compared with the PMOs targeting the 3′ end at the same concentration. As these PMOs were expected to induce exon 2 skipping, their efficacy was assessed by the established RT-PCR protocol following a densitometric analysis as mentioned above. Results of the RT-PCT products are shown in FIG. 4A and the densitometric analysis is shown in FIG. 4B.

[0742] Among the PMOs targeting the 3′ end of myostatin exon 2, PMOs 44, SEQ ID NO: 17 and 45, SEQ ID NO: 18 (and, at higher concentration, PMO 39, SEQ ID NO: 48) induced more consistent skipping than others, particularly at lower concentrations (FIG. 4B). The skipping efficacy was even higher when PMOs targeting 5′ end of myostatin exon 2 were used, with PMO 46, SEQ ID NO: 21 inducing nearly 100% skipping and PMOs 40 and 48, SEQ ID NO: 19 inducing about 80% skipping (FIG. 4B).

[0743] Screening of PMOs for Skipping Exon 2 of Mouse Myostatin: A Dose-Response Study for PMOs 39, 42, 43, 44, 45, 124 in C2C12 and H2Kbmdxcells

[0744] The first example of specific and reproducible exon skipping in the mdx mouse model was reported by Wilton et al. (Wilton, Lloyd et al. 1999; the contents of which are hereby incorporated by reference in its entirety). By directing an antisense molecule to the donor splice site, consistent and efficient exon 23 skipping was induced in the dystrophin mRNA within 6 hours of treatment of the cultured cells. Wilton et al. also describe targeting the acceptor region of the mouse dystrophin pre-mRNA with longer antisense oligonucleotides. While the first antisense oligonucleotide directed at the intron 23 donor splice site induced consistent exon skipping in primary cultured myoblasts, this compound was found to be much less efficient in immortalized cell cultures expressing higher levels of dystrophin. However, with refined targeting and antisense oligonucleotide design, the efficiency of specific exon removal was increased by almost an order of magnitude (Mann, Honeyman et al. 2002; the contents of which are hereby incorporated by reference in its entirety).

[0745] PMOs were initially tested in quadruplicate at doses of 0.25, 0.5, 1, 2, 5 μM in mouse myoblast C2C12 cells (FIG. 5A and FIG. 5C). Variable skipping was observed in replicates with the PMO sequences and the 0.5 and 2 μM doses used. The screening was alternatively performed in H2Kbmdx cells, a myoblast dystrophic cell model, demonstrating more consistent and reliable results (FIG. 5A and FIG. 5B).

[0746] In tested H2Kbmdx cell cultures, PMO 28 was the best PMO at the high concentration and one of the most efficient PMOs at the low concentration (as comparable as PMOs 45, SEQ ID NO: 18 and 39, SEQ ID NO: 48) (FIG. 5B).

[0747] Preliminary In Vivo Screening of Unconjugated PMO-MSTN Sequences in Mdx Mice

[0748] Based on the in vitro results, PMOs 39, SEQ ID NO: 48, 44, SEQ ID NO: 17, and 45, SEQ ID NO: 18 were selected for this study. PMO 124 was used as a control. An optimal dose of 3 nmoles (equal to 18×10¹⁴ molecules) of PMO 124 were injected into each Tibialis anterior (TA) muscle of 8 week-old mdx mice. The amounts of the other PMOs were normalised to the same number of molecules of PMO 124 injected. Both TA muscles of 2 mice were injected with each PMO (n=4 per group) in a final volume of 25 μl (diluted in saline). Muscles were harvested 2 weeks after the injection. The results are illustrated in FIG. 6A, FIG. 6B and FIG. 6C.

[0749] Calculation of PMO Doses:
[0750] a) PMO 39, SEQ ID NO: 48 (18 mer)=18.5 μg (2 mice, 4 TAs)
[0751] b) PMO 44, SEQ ID NO: 17 (25 mer)=25.4 μg (2 mice, 4 TAs)
[0752] c) PMO 45, SEQ ID NO: 18 (25 mer)=25.5 μg (2 mice, 4 TAs)
[0753] d) PMO 124 (28 mer)=28.8 μg (2 mice, 4 TAs)

[0754] These amounts in μg correspond to 18×10¹⁴ molecules per each PMO.

[0755] All PMOs tested were biologically active in vivo. The skipping efficiency was highest and lowest in PMO 124 and 45, SEQ ID NO: 18 treated muscles, respectively (FIG. 6C). However, such efficiencies did not correlate with an increase in muscle weight. Muscles treated with PMO 45, SEQ ID NO: 18 were heavier than untreated or treated muscles with PMO 124 or 44, SEQ ID NO: 17 although the differences were not significant (FIG. 6B).

[0756] Systemic Injection of PMOs in Mdx Mice

[0757] PMOs 39, SEQ ID NO: 48, 44, SEQ ID NO: 17, 45, SEQ ID NO: 18, and 124 were also examined for systemic skipping efficacy. The screening was performed through tail vein intravenous injection in 8 week-old mdx mice. PMO 124 was used as a control and at the dose of 200 mg/kg (equal to 12.53×10¹⁸ molecules or 20.8 μmoles) diluted in 200 μl saline. The amount of the other PMOs was normalized to the number of molecules of PMO 124 injected. Three mice per group were used. Muscles were harvested 2 weeks after the injection, including the diaphragm—DIA, the extensor digitorum longus—EDL, the gastrocnemius—GAS, the soleus—SOL, and the tibialis anterior—TA. Results are illustrated in FIG. 7A, FIG. 7B, FIG. 7C and FIG. 7D.

[0758] Calculation of PMO Doses:
[0759] a) PMO 124 (28 mer)=200 mg/kg (3 mice)
[0760] b) PMO 45, SEQ ID NO: 18 (25 mer)=176.2 μg (3 mice)
[0761] c) PMO 44, SEQ ID NO: 17 (25 mer)=176.8 μg (3 mice)
[0762] d) PMO 39, SEQ ID NO: 48 (28 mer)=128.6 μg (3 mice)
[0763] These amounts in μg correspond to 12.53×10¹⁸ molecules (20.8 μmoles) per each PMO.

[0764] The skipping results were variable among muscles collected from a single mouse and among the same types of muscles from different mice (FIG. 7A and FIG. 7B). However, all PMOs were biologically active in dystrophic muscles after a single IV injection. GAS and TA showed a trend of increase in weight (normalised to final body weight; FIG. 7D) after being injected with PMO 45, SEQ ID NO: 18 or 124, compared to type-matched muscles of saline-injected mice.

[0765] In Vivo Screening of B Peptide-Conjugated PMOs in C57 Mice

[0766] PMO D30 (SEQ ID NO: 16), PMO39 (SEQ ID NO: 48) and PMO45 (SEQ ID NO: 18) selected from previous in vitro and in vivo screening were conjugated to B peptide (RAhxRRBRRAhxRRBRAhxB; SEQ ID No: 3499 and AhxB linker moiety at the peptide carboxy terminus) at the 3′-end of the PMO and delivered by systemic tail vein injection, weekly, for 14 weeks. B peptide conjugated PMO, also referred to hereafter as BPMO, was performed in 12-week old C57 mice, 10 mice per group. Two doses were tested at 10 or 20 mg/kg. After the last injection, the force of forelimbs was measured by gripstrength test (FIG. 9A and FIG. 9B). The maximal force of TA muscles of mice treated with 10 mg/kg BPMOs were measured by in situ electrophysiology (FIG. 9C). The heart, DIA and 4 skeletal muscles (EDL, GAS, SOL, TA) were harvested for assessment of muscle mass and myostatin exon skipping.

[0767] Some of the mice in the BPMO-39 and BPMO-D30 treated groups at 20 mg/kg did not receive IV injection during the last 4-6 weeks as the tail vein was hardly visible. These mice were injected by IP instead. In BPMO-39, 20 mg/kg treated group, two mice died during the study.

[0768] Results:

[0769] 1) Increase in body and muscle mass: the body weight of mice in the BPMO-39 treated group (10 or 20 mg/kg) was significantly increased compared with the weight of both saline and scramble BPMO injected animals (FIG. 8A and FIG. 8C). BPMO-D30 induced a very efficient bodyweight increase when used at 20 mg/kg (FIG. 8C). Variability in muscle mass (normalized against the initial body weight) was observed depending on the dosage administered and muscle considered (FIG. 8B and FIG. 8D). BPMO-39 showed the most consistent muscle increase in TA (10 or 20 mg/kg treatment; FIG. 8B and FIG. 8D) and GAS (10 mg/kg treatment; FIG. 8B) while BPMO-D30 or −45 induced mass increase in TA (10 mg/kg treatment; FIG. 8B) or GAS (20 mg/kg treatment; FIG. 8D). In the DIA of 20 mg/kg treated mice all of the tested BPMOs induced a significant muscle weight gain (FIG. 8D). The IP delivery route used in the last few injections may have had an influence on this result.

[0770] 2) Gripstrength analysis: Measurement of the forelimb force was performed in mice treated with both BPMO dosages (FIG. 9A and FIG. 9B). BPMO-39 was the only candidate showing enhanced muscle strength compared with saline group, and only at 10 mg/kg treatment (FIG. 9A). The scramble BPMO unexpectedly and unexplainably increased the forelimb strength of treated mice significantly different compared to the saline treated mice at both 10 and 20 mg/kg doses (FIG. 9A and FIG. 9B).

[0771] 3) In situ muscle physiology test: The TAs of mice treated with 10 mg/kg BPMOs were analyzed using an electrophysiology assessment. BPMO-D30 significantly increased the generated maximal and specific forces compared to the scramble PMO and the other tested BPMOs (FIG. 9C).

[0772] 4) Exon skipping quantification: The myostatin skipping efficiency of DIA (FIG. 10A and FIG. 10B) and TA (FIG. 10C and FIG. 10D) muscles was analyzed. The skipping levels in 20 mg/kg treated muscles were 3-4 fold higher than the levels in 10 mg/kg treated muscles (FIG. 10B and FIG. 10D). BPMO-D30 and −45 were significantly more efficient than BPMO-39 at 20 mg/kg dose (DIA, FIG. 10B and TA, FIG. 10D) or 10 mg/kg dose (TA, FIG. 10D) used.

[0773] Provisional results of in vivo screening: BPMO-D30 and BPMO-45 were the most effective molecules taking in account the general effect on muscle weight, strength and exon skipping efficiency. Histological analysis will be performed (as possible data on the cross sectional analysis of myofibres).

### Example 25 BPMO-Induced Dual Exon Skipping: Combination Myostatin and Dystrophin Treatment

[0774] Rescue of dystrophin reading frame+knockdown of myostatin in young dystrophic mice.

[0775] PMO M23D (SEQ ID NO. 937) was conjugated to B peptide (RAhxRRBRRAhxRRBRAhxB; SEQ ID No: 3499 and AhxB linker moiety at the peptide carboxy terminus) at the 3′-end of the PMO and was named BPMO-M23D. BPMO-M23D (10 mg/kg) and/or BPMO-MSTN (D30, 10 mg/kg) were diluted in 200 μl saline and injected through the tail vein of 6 week-old mdx mice or C57BL10 mice. The injection was repeated weekly for 10 weeks. Ten mice were used for each treatment. Details of 5 groups of mice as follow:
[0776] a) C57BL10 mice+Saline (positive control)
[0777] b) Mdx mice+Saline (negative control)
[0778] c) Mdx mice+BPMO-M23D, SEQ ID NO: 937 (10 mg/kg)
[0779] d) Mdx mice+BPMO-M23D, SEQ ID NO: 937 (10 mg/kg) & BPMO-MSTN, SEQ ID NO: 16 (10 mg/kg)
[0780] e) Mdx mice+BPMO-MSTN, SEQ ID NO: 16 (10 mg/kg)

[0781] Results:

[0782] After 12 weeks of treatment no significant increase in bodyweight was observed in treated mdx mice compared with saline injected animals (FIG. 11A). The grip strength analysis measuring the forelimb force revealed that injection of BPMO-M23D induced a significant increase in force compared to that of mdx mice while co-injection of BPMO-M23D and BPMO-MSTN normalized the strength to that of C57 mice (FIG. 11B). BPMO-MSTN treatment alone did not modify the muscle strength of treated mice compared to saline injected mdx mice (FIG. 11B). The grip strength test reported above was further conducted as follows. The tests were performed in 3 consecutive days (following activity cage assessment). In each test, the values of 5 reads/mouse were recorded. Each was the highest value of the forelimb force measured within 30 sec, with 30 sec interval between 2 reads. Data are shown as a total of 15 reads/mouse (FIG. 18A) or as 3×average of 5 reads/mouse/test (FIG. 18B), or as 3×highest value of 5 reads/mouse/test (FIG. 18C). Statistical analysis was by one-way ANOVA & Bonferroni post-hoc test (n=10 per group); error bars represent the S.E.M.

[0783] BPMO-M23D treatment alone or in combination with BPMO-MSTN induced a very efficient dystrophin exon skipping achieving 70-80% of dystrophin reframing in all muscles analysed, with an exception of about 25% skipping in the heart (FIG. 12A). Treatment with BPMO-M23D in combination with BPMO-MSTN resulted in greater DMD exon skipping efficiency than treatment with the BPMO-M23D alone. Restoration of dystrophin protein was subsequently confirmed by Western blot analysis, with expression in skeletal muscles ranging between 30-100% the level of C57 mice (FIG. 12B). Dystrophin expression was reconfirmed by immunohistochemistry. Myostatin exon 2 skipping was also efficient in mice that had received the dual treatment, with average skipping in all examined muscles about 55% (FIG. 12C).

[0784] Further histological analyses were performed in the harvested muscles to study the effect of the treatments on myofibre hypertrophy and regeneration. The number and diameter of myofibres were investigated in addition with the frequency of centrally nucleated fibres. The therapeutic benefit in EDL, GAS, SOL and TA muscles has been assessed. Results from TA fibre analysis are reported as representative (FIG. 13A and FIG. 13B). The treatment with BPMO-MSTN alone did not modify the dystrophic phenotype whereas BPMO-M23D and BPMO-M23D+BPMO-D30 treatments partially ameliorated the pathology with a decrease in the variability of myofibre cross sectional area (FIG. 13A) and in the presence of centrally nucleated fibres compared to untreated mdx muscles (FIG. 13B). This effect was essentially due to the dystrophin restoration that reduced both the pseudo-hypertrophy of mdx muscles and the muscle degeneration process.

[0785] Rescue of Dystrophin Reading Frame+Knockdown of Myostatin in Aged Mdx Mice

[0786] BPMO-MSTN and BPMO-M23D was injected using identical dose regimen and route of administration as reported above) in aged (>18 month old) mdx mice that recapitulate more accurately (compared to young mdx mice) the dystrophic disease observed in human. Mice were injected weekly for 10 weeks with either 10 mg/kg of BPMO-M23D (n=5) or BPMOM23D (10 mg/kg) and BPMO-MSTN (10 mg/kg) (n=5), or 20 mg/kg of scramble BPMO (n=4). One week after the last injection, mice underwent grip strength analyses to investigate the forelimb strength. TA muscles of treated mice were analysed by electrophysiology on the following week, prior to muscle collection.

[0787] Results:

[0788] Significant changes in bodyweight of treated mice (compared with scramble group) from week 7 were observed (FIG. 14A). The muscle mass was tested in DIA, EDL, GAS, SOL, TA and heart muscles in mice treated with scramble, BPMO-M23D, and BPMO-M23D and BPMO-MSTN (FIG. 14B). However, statistical analysis for body or muscle weight was not performed as scramble-injected mice died gradually and only 1 mouse survived at the end of the study. All of the mice treated with BPMO-M23D or with BPMO-M23D and BPMO-MSTN survived for the entire study. Gripstrength analysis demonstrated that mice treated with BPMO-M23D or with BPMO-M23D and BPMO-MSTN were stronger than mice treated with scramble BPMO (FIG. 14C). Further comparison of the maximal and specific force of TA muscles between the single and dual treatments displayed a significant improvement in resistance force against muscle-damaged lengthening contractions (eccentric contractions), with better effect seen in the combined treated group (FIG. 14D).

[0789] RT-PCRs were subsequently performed to evaluate the skipping efficiency of exon 23 of dystrophin that showed substantial levels of dystrophin reframing in all muscles (FIG. 15A). The addition of BPMO-MSTN increased the skipping efficiency of BPMO-M23D consistently as observed in young mdx mice (FIG. 15B). Results of dystrophin exon skipping correlated with a significant increase in protein expression in all muscles analysed (FIG. 16A). Further, it was shown that treatment with the combination of BPMO-MSTN and BPMO-M23D increased dystrophin levels over treatment with M23D alone (FIG. 16B).

[0790] Myostatin exon 2 skipping in all muscles harvested was evaluated by RT-PCR (FIG. 17A). The level of skipping varied between 5% and 40% depending on the muscle type analyzed. The average value obtained pulling together the results of all the muscles was about 20% (FIG. 17B).

[0791] It is believed that the disclosure set forth above encompasses at least one distinct invention with independent utility. While the invention has been disclosed in the exemplary forms, the specific embodiments thereof as disclosed and illustrated herein are not to be considered in a limiting sense as numerous variations are possible. Equivalent changes, modifications and variations of various embodiments, materials, compositions and methods may be made within the scope of the present invention, with substantially similar results. The subject matter of the inventions includes all novel and non-obvious combinations and subcombinations of the various elements, features, functions and/or properties disclosed herein.

[0792] Benefits, other advantages, and solutions to problems have been described herein with regard to specific embodiments. However, the benefits, advantages, solutions to problems, and any element or combination of elements that may cause any benefit, advantage, or solution to occur or become more pronounced are not to be construed as critical, required, or essential features or elements of any or all the claims of the invention. Many changes and modifications within the scope of the instant invention includes all such modifications. Corresponding structures, materials, acts, and equivalents of all elements in the claims below are intended to include any structure, material, or acts performing the functions in combination with other claim elements as specifically claimed. The scope of the invention should be determined by the appended claims and their legal equivalents, rather than by the examples given above.

TABLE 7
Sequence Listing

| SEQ | |
|---|---|
| ID | |
| NO: | SEQUENCE |
| 1 | agcaacttttcttttcttattcatttatagctgattttctaatgcaagtggatggaaaacccaaatgttgctt |
| | ctttaaatttagctctaaaatacaatacaataaagtagtaaaggcccaactatggatatatttgagaccc |
| | gtcgagactcctacaacagtgtttgtgcaaatcctgagactcatcaaacctatgaaagacggtacaag |
| | gtatactggaatccgatctctgaaacttgacatgaacccaggcactggtatttggcagagcattgatgt |
| | gaagacagtgttgcaaaattggctcaaacaacctgaatccaacttaggcattgaaataaaagctttagat |
| | gagaatggtcatgatcttgctgtaaccttcccaggaccaggagaagatgggctggtaagtgataactga |
| | aaataacattataat |
| 2 | cttttcttttcttattcatttatagctgattttctaatgcaagtggatgg |
| 3 | accttcccaggaccaggagaagatgggctg/gtaagtgataactgaaaataacattataat |
| 4 | gccagacctatttgactggaatagtgtggtttgccagcagtcagccacacaacgactggaac |
| | atgcattcaacatcgccagatatcaattaggcatagagaaactactcgatcctgaag |
| 5 | atgttgataccacctatccagataagaagtccatcttaatgtacatcacatcactcttccaagtttt |
| | gcctcaacaagtgagcattgaagccatccaggaagtggaaatgttgccaaggccacctaaag |
| | tgactaaagaagaacattttcagttacatcatcaaatgcactattctcaacag |
| 6 | atcacggtcagtctagcacagggatatgagagaacttcttcccctaagcctcgattcaagagct |
| | atgcctacacacaggctgcttatgtcaccacctctgaccctacacggagcccatttccttcacag |
| 7 | gccatagagcgagaaaaagctgagaagttcagaaaactgcaagatgccagcagatcagctca |
| | ggccctggtggaacagatggtgaatg |
| 8 | gctttacaaagttctctgcaagagcaacaaagtggcctatactatctcagcaccactgtgaaaga |
| | gatgtcgaagaaagcgccctctgaaattagccggaaatatcaatcagaatttgaagaaattgag |
| | ggacgctggaagaagctctcctcccagctggttgagcattgtcaaaagctagaggagcaaatga |
| | ataaactccgaaaaattcag |
| 9 | gcgatttgacagatctgttgagaaatggcggcgttttcattatgatataaagatatttaatcagtggct |
| | aacagaagctgaacagtttctcagaaagacacaaattcctgagaattgggaacatgctaaatacaa |
| | atggtatcttaag |
| 10 | gaactccaggatggcattgggcagcggcaaactgttgtcagaacattgaatgcaactggggaaga |
| | aataattcagcaatcctcaaaaacagatgccagtattctacaggaaaaattgggaagcctgaatctg |
| | cggtggcaggaggtctgcaaacagctgtcagacagaaaaaagag |
| 11 | aggaagttagaagatctgagctctgagtggaaggcggtaaaccgtttacttcaagagctgagggca |
| | aagcagcctgacctagctcctggactgaccactattggagcct |
| 12 | ctcctactcagactgttactctggtgacacaacctgtggttactaaggaaactgccatctccaaactag |
| | aaatgccatcttccttgatgttggaggtacctgctctggcagatttcaaccgggcttggacagaactta |
| | ccgactggctttctctgcttgatcaagttataaaatcacagagggtgatggtgggtgaccttgaggata |
| | tcaacgagatgatcatcaagcagaag |
| 13 | gcaacaatgcaggatttggaacagaggcgtccccagttggaagaactcattaccgctgcccaaaattt |
| | gaaaaacaagaccagcaatcaagaggctagaacaatcattacggatcgaa |
| 14 | ttgaaagaattcagaatcagtgggatgaagtacaagaacaccttcagaaccggaggcaacagttgaat |
| | gaaatgttaaaggattcaacacaatggctggaagctaaggaagaagctgagcaggtcttaggacagg |
| | ccagagccaagcttgagtcatggaaggagggtccctatacagtagatgcaatccaaaagaaaatcaca |
| | gaaaccaag |
| 15 | ggtgagtgagcgagaggctgctttggaagaaactcatagattactgcaacagttccccctggacctgga |
| | aaagtttcttgcctggcttacagaagctgaaacaactgccaatgtcctacaggatgctacccgtaaggaaa |
| | ggctcctagaagactccaagggagtaaaagagctgatgaaacaatggcaa |
| 16 | cagcccatcttctcctggtcctgggaaggt |
| 17 | ccagcccatcttctcctggtcctgg |
| 18 | cacttaccagcccatcttctcctgg |
| 19 | ccatccgcttgcattagaaagtcagc |
| 20 | gcattagaaaatcagctataaatg |
| 21 | ccacttgcattagaaaatcagc |
| 22 | cttgcattagaaaatcagctataaa |
| 23 | cacttgcattagaaaatcagctata |
| 24 | ccacttgcattagaaaatcagctat |
| 25 | tccacttgcattagaaaatcagcta |
| 26 | atccacttgcattagaaaatcagct |
| 27 | catccacttgcattagaaaatcagc |
| 28 | ttattttcagttatcacttaccagc |
| 29 | ttttcagttatcacttaccagccca |
| 30 | tcagttatcacttaccagcccatct |
| 31 | gttatcacttaccagcccatcttct |
| 32 | atcacttaccagcccatcttctcct |
| 33 | acttaccagcccatcttctcctggt |
| 34 | taccagcccatcttctcctggtcct |
| 35 | atgttattttcagttatcacttacc |
| 36 | tgttattttcagttatcacttacca |
| 37 | gttattttcagttatcacttaccag |
| 38 | tattttcagttatcacttaccagcc |
| 39 | attttcagttatcacttaccagccc |
| 40 | tttcagttatcacttaccagcccat |
| 41 | ttcagttatcacttaccagcccatc |
| 42 | cagttatcacttaccagcccatctt |
| 43 | agttatcacttaccagcccatcttc |
| 44 | cagcccatcttctcctggtcctgggaaggt |
| 45 | cagcccatcttctcctggtc |
| 46 | tctcctggtcctgggaaggt |
| 47 | ctgggaaggttacagcaaga |
| 48 | cagcccatcttctcctgg |
| 49 | gcccatcttctcctggtcctggg |
| 50 | tttaaagaagcaacatttgggtttt |
| 51 | tattttagagctaaatttaaagaag |
| 52 | tactttattgtattgtattttagag |
| 53 | tagttgggcctttactactttattg |
| 54 | tctcaaatatatccatagttgggcc |
| 55 | acgggtctcaaatatatccatagtt |
| 56 | gttgtaggagtctcgacgggtctcaaatat |
| 57 | acactgttgtaggagtctcgacggg |
| 58 | taggtttgatgagtctcaggatttg |
| 59 | ccgtctttcataggtttgatgagtc |
| 60 | cagtataccttgtaccgtctttcataggtt |
| 61 | gggttcatgtcaagtttcagagatc |
| 62 | aataccagtgcctgggttcatgtcaagttt |
| 63 | aaataccagtgcctgggttcatgtc |
| 64 | tctgccaaataccagtgcctgggtt |
| 65 | tcttcacatcaatgctctgccaaat |
| 66 | caggttgtttgagccaattttgcaa |
| 67 | tgcctaagttggattcaggttgttt |
| 68 | aagcttttatttcaatgcctaagtt |
| 69 | gaccattctcatctaaagcttttat |
| 70 | ttacagcaagatcatgaccattctc |
| 71 | yyagyyyaxyxxyxyyxggxyyxgg |
| 72 | yayxxayyagyyyaxyxxyxyyxgg |
| 73 | yyayxxgyaxxagaaaaxyagy |
| 74 | gyattagaaaatyagytataaatg |
| 75 | yyatyygyttgyattagaaagtyagy |
| 76 | ctccaacatcaaggaagatggcatttctag |
| 77 | ctccaacatc aaggaagatg gcatttctag |
| 78 | acaucaagga agauggcauu ucuag |
| 79 | acaucaagga agauggcauu ucuaguuugg |
| 80 | gagcaggtac ctccaacatc aaggaa |
| 81 | gggauccagu auacuuacag gcucc |
| 82 | cttacaggct ccaatagtgg tcagt |
| 83 | cctccggttc tgaaggtgtt cttgtac |
| 84 | gttgcctccg gttctgaagg tgttc |
| 85 | caatgccatc ctggagttcc tg |
| 86 | gauagguggu aucaacaucu guaa |
| 87 | gauagguggu aucaacaucu g |
| 88 | gauagguggu aucaacaucu guaag |
| 89 | ggugguauca acaucuguaa |
| 90 | guaucaacau cuguaagcac |
| 91 | ugcauguucc agucguugug ugg |
| 92 | cacuauucca gucaaauagg ucugg |
| 93 | auuuaccaac cuucaggauc gagua |
| 94 | ggccuaaaac acauacacau a |
| 95 | cauuuuugac cuacaugugg |
| 96 | uuugaccuac auguggaaag |
| 97 | uacauuuuug accuacaugu ggaaag |
| 98 | auuuuugacc uacaugggaa ag |
| 99 | uacgaguuga uugucggacc cag |
| 100 | guggucuccu uaccuaugac ugugg |
| 101 | ggucuccuua ccuauga |
| 102 | ugucucagua aucuucuuac cuau |
| 103 | ucuuaccuau gacuauggau gaga |
| 104 | gcaugaacuc uuguggaucc |
| 105 | ccaggguacu acuuacauua |
| 106 | aucguguguc acagcaucca g |
| 107 | uguucagggc augaacucuu guggauccuu |
| 108 | uaggaggcgc cucccauccu guaggucacu g |
| 109 | aggucuagga ggcgccuccc auccuguagg u |
| 110 | gcgccuccca uccuguaggu cacug |
| 111 | cuucgaggag gucuaggagg cgccuc |
| 112 | cucccauccu guaggucacu g |
| 113 | uaccaguuuu ugcccuguca gg |
| 114 | ucaauaugcu gcuucccaaa cugaaa |
| 115 | cuaggaggcg ccucccaucc uguag |
| 116 | uuaugauuuc caucuacgau gucaguacuu c |
| 117 | cuuaccugcc aguggaggau uauauuccaa a |
| 118 | caucaggauu cuuaccugcc agugg |
| 119 | cgaugucagu acuuccaaua uucac |
| 120 | accauucauc aggauucu |
| 121 | accugccagu ggaggauu |
| 122 | ccaauauuca cuaaaucaac cuguuaa |
| 123 | caggauuguu accugccagu ggaggauuau |
| 124 | acgaugucag uacuuccaau auucacuaaa u |
| 125 | auuuccaucu acgaugucag uacuuccaau a |
| 126 | caggagcuuc caaaugcugc a |
| 127 | cuugucuuca ggagcuucca aaugcugca |
| 128 | uccucagcag aaagaagcca cg |
| 129 | uuagaaaucu cuccuugugc |
| 130 | uaaauugggu guuacacaau |
| 131 | cccugaggca uucccaucuu gaau |
| 132 | aggacuuacu ugcuuuguuu |
| 133 | cuugaauuua ggagauucau cug |
| 134 | caucuucuga uaauuuuccu guu |
| 135 | ucuucuguuu uuguuagcca guca |
| 136 | ucuauguaaa cugaaaauuu |
| 137 | uucuggagau ccauuaaaac |
| 138 | cagcaguugc gugaucucca cuag |
| 139 | uucaucaacu accaccacca u |
| 140 | cuaagcaaaa uaaucugacc uuaag |
| 141 | cuuguaaaag aacccagcgg ucuucugu |
| 142 | caucuacaga uguuugccca uc |
| 143 | gaaggauguc uuguaaaaga acc |
| 144 | accuguucuu caguaagacg |
| 145 | caugacacac cuguucuuca guaa |
| 146 | cauuugagaa ggaugucuug |
| 147 | aucucccaau accuggagaa gaga |
| 148 | gccaugcacu aaaaaggcac ugcaagacau u |
| 149 | ucuuuaaagc caguugugug aauc |
| 150 | uuucugaaag ccaugcacua a |
| 151 | guacauacgg ccaguuuuug aagac |
| 152 | cuagauccgc uuuuaaaacc uguuaaaaca a |
| 153 | ucuuuucuag auccgcuuuu aaaaccuguu a |
| 154 | cuagauccgc uuuuaaaacc uguua |
| 155 | ccgucuucug ggucacugac uua |
| 156 | cuagauccgc uuuuaaaacc uguuaa |
| 157 | ccgcuuuuaa aaccuguuaa |
| 158 | uggauugcuu uuucuuuucu agaucc |
| 159 | caugcuuccg ucuucugggu cacug |
| 160 | gaucuuguuu gagugaauac agu |
| 161 | guuauccagc caugcuuccg uc |
| 162 | ugauaauugg uaucacuaac cugug |
| 163 | guaucacuaa ccugugcugu ac |
| 164 | cugcuggcau cuugcaguu |
| 165 | gccugagcug aucugcuggc aucuugcagu u |
| 166 | cuggcagaau ucgauccacc ggcuguuc |
| 167 | cagcaguagu ugucaucugc uc |
| 168 | ugauggggug guggguugg |
| 169 | aucugcauua acacccucua gaaag |
| 170 | ccggcuguuc aguuguucug aggc |
| 171 | aucugcauua acacccucua gaaagaaa |
| 172 | gaaggagaag agauucuuac cuuacaaa |
| 173 | auucgaucca ccggcuguuc |
| 174 | cagcaguagu ugucaucugc |
| 175 | gccgguugac uucauccugu gc |
| 176 | cugcauccag gaacaugggu cc |
| 177 | gucugcaucc aggaacaugg guc |
| 178 | guugaagauc ugauagccgg uuga |
| 179 | uacuuacugu cuguagcucu uucu |
| 180 | cacucauggu cuccugauag cgca |
| 181 | cugcaauucc ccgagucucu gc |
| 182 | acugcuggac ccauguccug aug |
| 183 | cuaaguugag guauggagag u |
| 184 | uauucacaga ccugcaauuc ccc |
| 185 | acaguggugc ugagauagua uaggcc |
| 186 | uaggccacuu uguugcucuu gc |
| 187 | uucagagggc gcuuucuuc |
| 188 | gggcaggcca uuccuccuuc aga |
| 189 | ucuucagggu uuguauguga uucu |
| 190 | cugggcugaa uugucugaau aucacug |
| 191 | cuguuggcac augugauccc acugag |
| 192 | gucuauaccu guuggcacau guga |
| 193 | ugcuuucugu aauucaucug gaguu |
| 194 | ccuccuuucu ggcauagacc uuccac |
| 195 | ugugucaucc auucgugcau cucug |
| 196 | uuaaggccuc uugugcuaca ggugg |
| 197 | ggggcucuuc uuuagcucuc uga |
| 198 | gacuuccaaa gucuugcauu uc |
| 199 | gccaacaugc ccaaacuucc uaag |
| 200 | cagagauuuc cucagcuccg ccagga |
| 201 | cuuacaucua gcaccucaga g |
| 202 | uccgccaucu guuagggucu gugcc |
| 203 | auuuggguua uccucugaau gucgc |
| 204 | cauaccucuu cauguaguuc cc |
| 205 | cauuugagcu gcguccaccu ugucug |
| 206 | uccugggcag acuggaugcu cuguuc |
| 207 | uugccugggc uuccugaggc auu |
| 208 | uucugaaaua acauauaccu gugc |
| 209 | uaguuucuga aauaacauau accug |
| 210 | gacuugucaa aucagauugg a |
| 211 | guuucugaaa uaacauauac cugu |
| 212 | caccagaaau acauaccaca |
| 213 | caaugauuua gcugugacug |
| 214 | cgaaacuuca uggagacauc uug |
| 215 | cuuguagacg cugcucaaaa uuggc |
| 216 | caugcacaca ccuuugcucc |
| 217 | ucuguacaau cugacgucca gucu |
| 218 | gucuuuauca ccauuuccac uucagac |
| 219 | ccgucugcuu uuucuguaca aucug |
| 220 | uccauaucug uagcugccag cc |
| 221 | ccaggcaacu ucagaaucca aau |
| 222 | uuucuguuac cugaaaagaa uuauaaugaa |
| 223 | cauucauuuc cuuucgcauc uuacg |
| 224 | ugaucucuuu gucaauucca uaucug |
| 225 | uucagugaua uagguuuuac cuuuccccag |
| 226 | cuguagcugc cagccauucu gucaag |
| 227 | ucuucugcuc gggaggugac a |
| 228 | ccaguuacua uucagaagac |
| 229 | ucuucaggug caccuucugu |
| 230 | ugugaugugg uccacauucu gguca |
| 231 | ccauguguuu cugguauucc |
| 232 | cguguagagu ccaccuuugg gcgua |
| 233 | uacuaauuuc cugcaguggu cacc |
| 234 | uucuguguga aauggcugca aauc |
| 235 | ccuucaaagg aauggaggcc |
| 236 | ugcugaauuu cagccuccag ugguu |
| 237 | ugaagucuuc cucuuucaga uucac |
| 238 | cuggcuuucu cucaucugug auuc |
| 239 | guuguaaguu gucuccucuu |
| 240 | uugucuguaa cagcugcugu |
| 241 | gcucuaauac cuugagagca |
| 242 | cuuugagacc ucaaauccug uu |
| 243 | cuuuauuuuc cuuucaucuc ugggc |
| 244 | aucguuucuu cacggacagu gugcugg |
| 245 | gggcuuguga gacaugagug auuu |
| 246 | accuucagag gacuccucuu gc |
| 247 | uauguguuac cuacccuugu cgguc |
| 248 | ggagagagcu uccuguagcu |
| 249 | ucacccuuuc cacaggcguu gca |
| 250 | uuugugucuu ucugagaaac |
| 251 | aaagacuuac cuuaagauac |
| 252 | aucugucaaa ucgccugcag |
| 253 | uuaccuugac uugcucaagc |
| 254 | uccagguuca agugggauac |
| 255 | gcucuucugg gcuuauggga gcacu |
| 256 | accuuuaucc acuggagauu ugucugc |
| 257 | uuccaccagu aacugaaaca g |
| 258 | ccacucagag cucagaucuu cuaacuucc |
| 259 | cuuccacuca gagcucagau cuucuaa |
| 260 | accagaguaa cagucugagu aggagc |
| 261 | cucauaccuu cugcuugaug auc |
| 262 | uucuguccaa gcccgguuga aauc |
| 263 | cuccaacauc aaggaagaug gcauuucuag |
| 264 | aucauuuuuu cucauaccuu cugcu |
| 265 | aucauuuuuu cucauaccuu cugcuaggag cuaaaa |
| 266 | cacccaccau cacccucugu g |
| 267 | aucaucucgu ugauauccuc aa |
| 268 | uccugcauug uugccuguaa g |
| 269 | uccaacuggg gacgccucug uuccaaaucc |
| 270 | acuggggacg ccucuguucc a |
| 271 | ccguaaugau uguucuagcc |
| 272 | uguuaaaaaa cuuacuucga |
| 273 | cauucaacug uugccuccgg uucug |
| 274 | cuguugccuc cgguucugaa ggug |
| 275 | cauucaacug uugccuccgg uucugaaggu g |
| 276 | uacuaaccuu gguuucugug a |
| 277 | cugaaggugu ucuuguacuu caucc |
| 278 | uguauaggga cccuccuucc augacuc |
| 279 | cuaaccuugg uuucugugau uuucu |
| 280 | gguaucuuug auacuaaccu ugguuuc |
| 281 | auucuuucaa cuagaauaaa ag |
| 282 | gauucugaau ucuuucaacu agaau |
| 283 | aucccacuga uucugaauuc |
| 284 | uuggcucugg ccuguccuaa ga |
| 285 | cucuuuucca gguucaagug ggauacuagc |
| 286 | caagcuuuuc uuuuaguugc ugcucuuuuc c |
| 287 | uauucuuuug uucuucuagc cuggagaaag |
| 288 | cugcuuccuc caaccauaaa acaaauuc |
| 289 | ccaaugccau ccuggaguuc cuguaa |
| 290 | uccuguagaa uacuggcauc |
| 291 | ugcagaccuc cugccaccgc agauuca |
| 292 | cuaccucuuu uuucugucug |
| 293 | uguuuuugag gauugcugaa |
| 294 | gttgcctccg gttctgaagg tgttcttg |
| 295 | ctgaaggtgt tcttgtactt catcc |
| 296 | ctgttgcctc cggttctgaa ggtgttcttg |
| 297 | caactgttgc ctccggttct gaaggtgttc ttg |
| 298 | ctccggttct gaaggtgttc ttgta |
| 299 | atttcattca actgttgcct ccggttct |
| 300 | tgaaggtgtt cttgtacttc atccc |
| 301 | cattcaactg ttgcctccgg ttct |
| 302 | tgttgcctcc ggttctgaag gt |
| 303 | gttgcctccg gttctgaagg tgttc |
| 304 | gcctccggtt ctgaaggtgt tcttgtac |
| 305 | cctccggttc tgaaggtgtt cttgtac |
| 306 | ctccggttct gaaggtgttc ttgtac |
| 307 | gcctccggtt ctgaaggtgt tcttg |
| 308 | cagatctgtc aaatcgcctg cagg |
| 309 | caacagatct gtcaaatcgc ctgcagg |
| 310 | ctcaacagat ctgtcaaatc gcctgcagg |
| 311 | gtgtctttct gagaaactgt tcagc |
| 312 | gagaaactgt tcagcttctg ttagccac |
| 313 | gaaactgttc agcttctgtt agccactg |
| 314 | ctgttcagct tctgttagcc actg |
| 315 | atctgtcaaa tcgcctgcag |
| 316 | tttgtgtctt tctgagaaac |
| 317 | tgttcagctt ctgttagcca ctga |
| 318 | gatctgtcaa atcgcctgca ggtaa |
| 319 | aaactgttca gcttctgtta gccac |
| 320 | ttgtgtcttt ctgagaaact gttca |
| 321 | caacagatct gtcaaatcgc ctgcag |
| 322 | cagatctgtc aaatcgcctg caggta |
| 323 | ctgttcagct tctgttagcc actgatt |
| 324 | gaaactgttc agcttctgtt agccactgat t |
| 325 | agaaactgtt cagcttctgt tagcca |
| 326 | ctgcaggtaa aagcatatgg atcaa |
| 327 | atcgcctgca ggtaaaagca tatgg |
| 328 | gtcaaatcgc ctgcaggtaa aagca |
| 329 | caacagatct gtcaaatcgc ctgca |
| 330 | tttctcaaca gatctgtcaa atcgc |
| 331 | ccatttctca acagatctgt caaat |
| 332 | ataatgaaaa cgccgccatt tctca |
| 333 | aaatatcttt atatcataat gaaaa |
| 334 | tgttagccac tgattaaata tcttt |
| 335 | ccaattctca ggaatttgtg tcttt |
| 336 | gtatttagca tgttcccaat tctca |
| 337 | cttaagatac catttgtatt tagca |
| 338 | cttaccttaa gataccattt gtatt |
| 339 | aaagacttac cttaagatac cattt |
| 340 | aaatcaaaga cttaccttaa gatac |
| 341 | aaaacaaatc aaagacttac cttaa |
| 342 | tcgaaaaaac aaatcaaaga cttac |
| 343 | ctgtaagata ccaaaaaggc aaaac |
| 344 | cctgtaagat accaaaaagg caaaa |
| 345 | agttcctgta agataccaaa aaggc |
| 346 | gagttcctgt aagataccaa aaagg |
| 347 | cctggagttc ctgtaagata ccaaa |
| 348 | tcctggagtt cctgtaagat accaa |
| 349 | gccatcctgg agttcctgta agata |
| 350 | tgccatcctg gagttcctgt aagat |
| 351 | ccaatgccat cctggagttc ctgta |
| 352 | cccaatgcca tcctggagtt cctgt |
| 353 | gctgcccaat gccatcctgg agttc |
| 354 | cgctgcccaa tgccatcctg gagtt |
| 355 | aacagtttgc cgctgcccaa tgcca |
| 356 | ctgacaacag tttgccgctg cccaa |
| 357 | gttgcattca atgttctgac aacag |
| 358 | gctgaattat ttcttcccca gttgc |
| 359 | attatttctt ccccagttgc attca |
| 360 | ggcatctgtt tttgaggatt gctga |
| 361 | tttgaggatt gctgaattat ttctt |
| 362 | aatttttcct gtagaatact ggcat |
| 363 | atactggcat ctgtttttga ggatt |
| 364 | accgcagatt caggcttccc aattt |
| 365 | ctgtttgcag acctcctgcc accgc |
| 366 | agattcaggc ttcccaattt ttcct |
| 367 | ctcttttttc tgtctgacag ctgtt |
| 368 | acctcctgcc accgcagatt caggc |
| 369 | cctacctctt ttttctgtct gacag |
| 370 | gacagctgtt tgcagacctc ctgcc |
| 371 | gtcgccctac ctcttttttc tgtct |
| 372 | gatctgtcgc cctacctctt ttttc |
| 373 | tattagatct gtcgccctac ctctt |
| 374 | attcctatta gatctgtcgc cctac |
| 375 | agataccaaa aaggcaaaac |
| 376 | aagataccaa aaaggcaaaa |
| 377 | cctgtaagat accaaaaagg |
| 378 | gagttcctgt aagataccaa |
| 379 | tcctggagtt cctgtaagat |
| 380 | tgccatcctg gagttcctgt |
| 381 | cccaatgcca tcctggagtt |
| 382 | cgctgcccaa tgccatcctg |
| 383 | ctgacaacag tttgccgctg |
| 384 | gttgcattca atgttctgac |
| 385 | attatttctt ccccagttgc |
| 386 | tttgaggatt gctgaattat |
| 387 | atactggcat ctgtttttga |
| 388 | aatttttcct gtagaatact |
| 389 | agattcaggc ttcccaattt |
| 390 | acctcctgcc accgcagatt |
| 391 | gacagctgtt tgcagacctc |
| 392 | ctcttttttc tgtctgacag |
| 393 | cctacctctt ttttctgtct |
| 394 | gtcgccctac ctcttttttc |
| 395 | gatctgtcgc cctacctctt |
| 396 | tattagatct gtcgccctac |
| 397 | attcctatta gatctgtcgc |
| 398 | gggggatttg agaaaataaa attac |
| 399 | atttgagaaa ataaaattac cttga |
| 400 | ctagcctgga gaaagaagaa taaaa |
| 401 | agaaaataaa attaccttga cttgc |
| 402 | ttcttctagc ctggagaaag aagaa |
| 403 | ataaaattac cttgacttgc tcaag |
| 404 | ttttgttctt ctagcctgga gaaag |
| 405 | attaccttga cttgctcaag ctttt |
| 406 | tattcttttg ttcttctagc ctgga |
| 407 | cttgacttgc tcaagctttt ctttt |
| 408 | caagatattc ttttgttctt ctagc |
| 409 | cttttagttg ctgctctttt ccagg |
| 410 | ccaggttcaa gtgggatact agcaa |
| 411 | atctctttga aattctgaca agata |
| 412 | agcaatgtta tctgcttcct ccaac |
| 413 | aacaaattca tttaaatctc tttga |
| 414 | ccaaccataa aacaaattca tttaa |
| 415 | ttcctccaac cataaaacaa attca |
| 416 | tttaaatctc tttgaaattc tgaca |
| 417 | tgacaagata ttcttttgtt cttct |
| 418 | ttcaagtggg atactagcaa tgtta |
| 419 | agatattctt ttgttcttct agcct |
| 420 | ctgctctttt ccaggttcaa gtggg |
| 421 | ttcttttgtt cttctagcct ggaga |
| 422 | cttttctttt agttgctgct ctttt |
| 423 | ttgttcttct agcctggaga aagaa |
| 424 | cttctagcct ggagaaagaa gaata |
| 425 | agcctggaga aagaagaata aaatt |
| 426 | ctggagaaag aagaataaaa ttgtt |
| 427 | gaaagaagaa taaaattgtt |
| 428 | ggagaaagaa gaataaaatt |
| 429 | agcctggaga aagaagaata |
| 430 | cttctagcct ggagaaagaa |
| 431 | ttgttcttct agcctggaga |
| 432 | ttcttttgtt cttctagcct |
| 433 | tgacaagata ttcttttgtt |
| 434 | atctctttga aattctgaca |
| 435 | aacaaattca tttaaatctc |
| 436 | ttcctccaac cataaaacaa |
| 437 | agcaatgtta tctgcttcct |
| 438 | ttcaagtggg atactagcaa |
| 439 | ctgctctttt ccaggttcaa |
| 440 | cttttctttt agttgctgct |
| 441 | cttgacttgc tcaagctttt |
| 442 | attaccttga cttgctcaag |
| 443 | ataaaattac cttgacttgc |
| 444 | agaaaataaa attaccttga |
| 445 | atttgagaaa ataaaattac |
| 446 | gggggatttg agaaaataaa |
| 447 | ctgaaacaga caaatgcaac aacgt |
| 448 | agtaactgaa acagacaaat gcaac |
| 449 | ccaccagtaa ctgaaacaga caaat |
| 450 | ctcttccacc agtaactgaa acaga |
| 451 | ggcaactctt ccaccagtaa ctgaa |
| 452 | gcaggggcaa ctcttccacc agtaa |
| 453 | ctggcgcagg ggcaactctt ccacc |
| 454 | tttaattgtt tgagaattcc ctggc |
| 455 | ttgtttgaga attccctggc gcagg |
| 456 | gcacgggtcc tccagtttca tttaa |
| 457 | tccagtttca tttaattgtt tgaga |
| 458 | gcttatggga gcacttacaa gcacg |
| 459 | tacaagcacg ggtcctccag tttca |
| 460 | agtttatctt gctcttctgg gctta |
| 461 | tctgcttgag cttattttca agttt |
| 462 | atcttgctct tctgggctta tggga |
| 463 | ctttatccac tggagatttg tctgc |
| 464 | cttattttca agtttatctt gctct |
| 465 | ctaaccttta tccactggag atttg |
| 466 | atttgtctgc ttgagcttat tttca |
| 467 | aatgtctaac ctttatccac tggag |
| 468 | tggttaatgt ctaaccttta tccac |
| 469 | agagatggtt aatgtctaac cttta |
| 470 | acggaagaga tggttaatgt ctaac |
| 471 | acagacaaat gcaacaacgt |
| 472 | ctgaaacaga caaatgcaac |
| 473 | agtaactgaa acagacaaat |
| 474 | ccaccagtaa ctgaaacaga |
| 475 | ctcttccacc agtaactgaa |
| 476 | ggcaactctt ccaccagtaa |
| 477 | ctggcgcagg ggcaactctt |
| 478 | ttgtttgaga attccctggc |
| 479 | tccagtttca tttaattgtt |
| 480 | tacaagcacg ggtcctccag |
| 481 | gcttatggga gcacttacaa |
| 482 | atcttgctct tctgggctta |
| 483 | cttattttca agtttatctt |
| 484 | atttgtctgc ttgagcttat |
| 485 | ctttatccac tggagatttg |
| 486 | ctaaccttta tccactggag |
| 487 | aatgtctaac ctttatccac |
| 488 | tggttaatgt ctaaccttta |
| 489 | agagatggtt aatgtctaac |
| 490 | acggaagaga tggttaatgt |
| 491 | ctgaaaggaa aatacatttt aaaaa |
| 492 | cctgaaagga aaatacattt taaaa |
| 493 | gaaacctgaa aggaaaatac atttt |
| 494 | ggaaacctga aaggaaaata cattt |
| 495 | ctctggaaac ctgaaaggaa aatac |
| 496 | gctctggaaa cctgaaagga aaata |
| 497 | taaagctctg gaaacctgaa aggaa |
| 498 | gtaaagctct ggaaacctga aagga |
| 499 | tcaggtaaag ctctggaaac ctgaa |
| 500 | ctcaggtaaa gctctggaaa cctga |
| 501 | gtttctcagg taaagctctg gaaac |
| 502 | tgtttctcag gtaaagctct ggaaa |
| 503 | aatttctcct tgtttctcag gtaaa |
| 504 | tttgagcttc aatttctcct tgttt |
| 505 | ttttatttga gcttcaattt ctcct |
| 506 | aagctgccca aggtctttta tttga |
| 507 | aggtcttcaa gctttttttc aagct |
| 508 | ttcaagcttt ttttcaagct gccca |
| 509 | gatgatttaa ctgctcttca aggtc |
| 510 | ctgctcttca aggtcttcaa gcttt |
| 511 | aggagataac cacagcagca gatga |
| 512 | cagcagatga tttaactgct cttca |
| 513 | atttccaact gattcctaat aggag |
| 514 | cttggtttgg ttggttataa atttc |
| 515 | caactgattc ctaataggag ataac |
| 516 | cttaacgtca aatggtcctt cttgg |
| 517 | ttggttataa atttccaact gattc |
| 518 | cctaccttaa cgtcaaatgg tcctt |
| 519 | tccttcttgg tttggttggt tataa |
| 520 | agttccctac cttaacgtca aatgg |
| 521 | caaaaagttc cctaccttaa cgtca |
| 522 | taaagcaaaa agttccctac cttaa |
| 523 | atatttaaag caaaaagttc cctac |
| 524 | aggaaaatac attttaaaaa |
| 525 | aaggaaaata cattttaaaa |
| 526 | cctgaaagga aaatacattt |
| 527 | ggaaacctga aaggaaaata |
| 528 | gctctggaaa cctgaaagga |
| 529 | gtaaagctct ggaaacctga |
| 530 | ctcaggtaaa gctctggaaa |
| 531 | aatttctcct tgtttctcag |
| 532 | ttttatttga gcttcaattt |
| 533 | aagctgccca aggtctttta |
| 534 | ttcaagcttt ttttcaagct |
| 535 | ctgctcttca aggtcttcaa |
| 536 | cagcagatga tttaactgct |
| 537 | aggagataac cacagcagca |
| 538 | caactgattc ctaataggag |
| 539 | ttggttataa atttccaact |
| 540 | tccttcttgg tttggttggt |
| 541 | cttaacgtca aatggtcctt |
| 542 | cctaccttaa cgtcaaatgg |
| 543 | agttccctac cttaacgtca |
| 544 | caaaaagttc cctaccttaa |
| 545 | taaagcaaaa agttccctac |
| 546 | atatttaaag caaaaagttc |
| 547 | ctggggaaaa gaacccatat agtgc |
| 548 | tcctggggaa aagaacccat atagt |
| 549 | gtttcctggg gaaaagaacc catat |
| 550 | cagtttcctg gggaaaagaa cccat |
| 551 | tttcagtttc ctggggaaaa gaacc |
| 552 | tatttcagtt tcctggggaa aagaa |
| 553 | tgctatttca gtttcctggg gaaaa |
| 554 | actgctattt cagtttcctg gggaa |
| 555 | tgaactgcta tttcagtttc ctggg |
| 556 | cttgaactgc tatttcagtt tcctg |
| 557 | tagcttgaac tgctatttca gtttc |
| 558 | tttagcttga actgctattt cagtt |
| 559 | ttccacatcc ggttgtttag cttga |
| 560 | tgccctttag acaaaatctc ttcca |
| 561 | tttagacaaa atctcttcca catcc |
| 562 | gtttttcctt gtacaaatgc tgccc |
| 563 | gtacaaatgc tgccctttag acaaa |
| 564 | cttcactggc tgagtggctg gtttt |
| 565 | ggctggtttt tccttgtaca aatgc |
| 566 | attaccttca ctggctgagt ggctg |
| 567 | gcttcattac cttcactggc tgagt |
| 568 | aggttgcttc attaccttca ctggc |
| 569 | gctagaggtt gcttcattac cttca |
| 570 | atattgctag aggttgcttc attac |
| 571 | gaaaagaacc catatagtgc |
| 572 | gggaaaagaa cccatatagt |
| 573 | tcctggggaa aagaacccat |
| 574 | cagtttcctg gggaaaagaa |
| 575 | tatttcagtt tcctggggaa |
| 576 | actgctattt cagtttcctg |
| 577 | cttgaactgc tatttcagtt |
| 578 | tttagcttga actgctattt |
| 579 | ttccacatcc ggttgtttag |
| 580 | tttagacaaa atctcttcca |
| 581 | gtacaaatgc tgccctttag |
| 582 | ggctggtttt tccttgtaca |
| 583 | cttcactggc tgagtggctg |
| 584 | attaccttca ctggctgagt |
| 585 | gcttcattac cttcactggc |
| 586 | aggttgcttc attaccttca |
| 587 | gctagaggtt gcttcattac |
| 588 | atattgctag aggttgcttc |
| 589 | ctttaacaga aaagcataca catta |
| 590 | tcctctttaa cagaaaagca tacac |
| 591 | ttcctcttta acagaaaagc ataca |
| 592 | taacttcctc tttaacagaa aagca |
| 593 | ctaacttcct ctttaacaga aaagc |
| 594 | tcttctaact tcctctttaa cagaa |
| 595 | atcttctaac ttcctcttta acaga |
| 596 | tcagatcttc taacttcctc tttaa |
| 597 | ctcagatctt ctaacttcct cttta |
| 598 | agagctcaga tcttctaact tcctc |
| 599 | cagagctcag atcttctaac ttcct |
| 600 | cactcagagc tcagatcttc tact |
| 601 | ccttccactc agagctcaga tcttc |
| 602 | gtaaacggtt taccgccttc cactc |
| 603 | ctttgccctc agctcttgaa gtaaa |
| 604 | ccctcagctc ttgaagtaaa cggtt |
| 605 | ccaggagcta ggtcaggctg ctttg |
| 606 | ggtcaggctg ctttgccctc agctc |
| 607 | aggctccaat agtggtcagt ccagg |
| 608 | tcagtccagg agctaggtca ggctg |
| 609 | cttacaggct ccaatagtgg tcagt |
| 610 | gtatacttac aggctccaat agtgg |
| 611 | atccagtata cttacaggct ccaat |
| 612 | atgggatcca gtatacttac aggct |
| 613 | agagaatggg atccagtata cttac |
| 614 | acagaaaagc atacacatta |
| 615 | tttaacagaa aagcatacac |
| 616 | tcctctttaa cagaaaagca |
| 617 | taacttcctc tttaacagaa |
| 618 | tcttctaact tcctctttaa |
| 619 | tcagatcttc taacttcctc |
| 620 | ccttccactc agagctcaga |
| 621 | gtaaacggtt taccgccttc |
| 622 | ccctcagctc ttgaagtaaa |
| 623 | ggtcaggctg ctttgccctc |
| 624 | tcagtccagg agctaggtca |
| 625 | aggctccaat agtggtcagt |
| 626 | cttacaggct ccaatagtgg |
| 627 | gtatacttac aggctccaat |
| 628 | atccagtata cttacaggct |
| 629 | atgggatcca gtatacttac |
| 630 | agagaatggg atccagtata |
| 631 | ctaaaatatt ttgggttttt gcaaaa |
| 632 | gctaaaatat tttgggtttt tgcaaa |
| 633 | taggagctaa aatattttgg gttttt |
| 634 | agtaggagct aaaatatttt gggtt |
| 635 | tgagtaggag ctaaaatatt ttggg |
| 636 | ctgagtagga gctaaaatat tttggg |
| 637 | cagtctgagt aggagctaaa atatt |
| 638 | acagtctgag taggagctaa aatatt |
| 639 | gagtaacagt ctgagtagga gctaaa |
| 640 | cagagtaaca gtctgagtag gagct |
| 641 | caccagagta acagtctgag taggag |
| 642 | gtcaccagag taacagtctg agtag |
| 643 | aaccacaggt tgtgtcacca gagtaa |
| 644 | gttgtgtcac cagagtaaca gtctg |
| 645 | tggcagtttc cttagtaacc acaggt |
| 646 | atttctagtt tggagatggc agtttc |
| 647 | ggaagatggc atttctagtt tggag |
| 648 | catcaaggaa gatggcattt ctagtt |
| 649 | gagcaggtac ctccaacatc aaggaa |
| 650 | atctgccaga gcaggtacct ccaac |
| 651 | aagttctgtc caagcccggt tgaaat |
| 652 | cggttgaaat ctgccagagc aggtac |
| 653 | gagaaagcca gtcggtaagt tctgtc |
| 654 | gtcggtaagt tctgtccaag cccgg |
| 655 | ataacttgat caagcagaga aagcca |
| 656 | aagcagagaa agccagtcgg taagt |
| 657 | caccctctgt gattttataa cttgat |
| 658 | caaggtcacc caccatcacc ctctgt |
| 659 | catcaccctc tgtgatttta taact |
| 660 | cttctgcttg atgatcatct cgttga |
| 661 | ccttctgctt gatgatcatc tcgttg |
| 662 | atctcgttga tatcctcaag gtcacc |
| 663 | tcataccttc tgcttgatga tcatct |
| 664 | tcattttttc tcataccttc tgcttg |
| 665 | ttttctcata ccttctgctt gatgat |
| 666 | ttttatcatt ttttctcata ccttct |
| 667 | ccaactttta tcattttttc tcatac |
| 668 | atattttggg tttttgcaaa |
| 669 | aaaatatttt gggtttttgc |
| 670 | gagctaaaat attttgggtt |
| 671 | agtaggagct aaaatatttt |
| 672 | gtctgagtag gagctaaaat |
| 673 | taacagtctg agtaggagct |
| 674 | cagagtaaca gtctgagtag |
| 675 | cacaggttgt gtcaccagag |
| 676 | agtttcctta gtaaccacag |
| 677 | tagtttggag atggcagttt |
| 678 | ggaagatggc atttctagtt |
| 679 | tacctccaac atcaaggaag |
| 680 | atctgccaga gcaggtacct |
| 681 | ccaagcccgg ttgaaatctg |
| 682 | gtcggtaagt tctgtccaag |
| 683 | aagcagagaa agccagtcgg |
| 684 | ttttataact tgatcaagca |
| 685 | catcaccctc tgtgatttta |
| 686 | ctcaaggtca cccaccatca |
| 687 | catctcgttg atatcctcaa |
| 688 | cttctgcttg atgatcatct |
| 689 | cataccttct gcttgatgat |
| 690 | tttctcatac cttctgcttg |
| 691 | cattttttct cataccttct |
| 692 | tttatcattt tttctcatac |
| 693 | caacttttat cattttttct |
| 694 | ctgtaagaac aaatatccct tagta |
| 695 | tgcctgtaag aacaaatatc cctta |
| 696 | gttgcctgta agaacaaata tccct |
| 697 | attgttgcct gtaagaacaa atatc |
| 698 | gcattgttgc ctgtaagaac aaata |
| 699 | cctgcattgt tgcctgtaag aacaa |
| 700 | atcctgcatt gttgcctgta agaac |
| 701 | caaatcctgc attgttgcct gtaag |
| 702 | tccaaatcct gcattgttgc ctgta |
| 703 | tgttccaaat cctgcattgt tgcct |
| 704 | tctgttccaa atcctgcatt gttgc |
| 705 | aactggggac gcctctgttc caaat |
| 706 | gcctctgttc caaatcctgc attgt |
| 707 | cagcggtaat gagttcttcc aactg |
| 708 | cttccaactg gggacgcctc tgttc |
| 709 | cttgtttttc aaattttggg cagcg |
| 710 | ctagcctctt gattgctggt cttgt |
| 711 | ttttcaaatt ttgggcagcg gtaat |
| 712 | ttcgatccgt aatgattgtt ctagc |
| 713 | gattgctggt cttgtttttc aaatt |
| 714 | cttacttcga tccgtaatga ttgtt |
| 715 | ttgttctagc ctcttgattg ctggt |
| 716 | aaaaacttac ttcgatccgt aatga |
| 717 | tgttaaaaaa cttacttcga tccgt |
| 718 | atgcttgtta aaaaacttac ttcga |
| 719 | gtcccatgct tgttaaaaaa cttac |
| 720 | agaacaaata tcccttagta |
| 721 | gtaagaacaa atatccctta |
| 722 | tgcctgtaag aacaaatatc |
| 723 | attgttgcct gtaagaacaa |
| 724 | cctgcattgt tgcctgtaag |
| 725 | caaatcctgc attgttgcct |
| 726 | gcctctgttc caaatcctgc |
| 727 | cttccaactg gggacgcctc |
| 728 | cagcggtaat gagttcttcc |
| 729 | ttttcaaatt ttgggcagcg |
| 730 | gattgctggt cttgtttttc |
| 731 | ttgttctagc ctcttgattg |
| 732 | ttcgatccgt aatgattgtt |
| 733 | cttacttcga tccgtaatga |
| 734 | aaaaacttac ttcgatccgt |
| 735 | tgttaaaaaa cttacttcga |
| 736 | atgcttgtta aaaaacttac |
| 737 | gtcccatgct tgttaaaaaa |
| 738 | ctagaataaa aggaaaaata aatat |
| 739 | aactagaata aaaggaaaaa taaat |
| 740 | ttcaactaga ataaaaggaa aaata |
| 741 | ctttcaacta gaataaaagg aaaaa |
| 742 | attctttcaa ctagaataaa aggaa |
| 743 | gaattctttc aactagaata aaagg |
| 744 | tctgaattct ttcaactaga ataaa |
| 745 | attctgaatt ctttcaacta gaata |
| 746 | ctgattctga attctttcaa ctaga |
| 747 | cactgattct gaattctttc aacta |
| 748 | tcccactgat tctgaattct ttcaa |
| 749 | catcccactg attctgaatt ctttc |
| 750 | tacttcatcc cactgattct gaatt |
| 751 | cggttctgaa ggtgttcttg tact |
| 752 | ctgttgcctc cggttctgaa ggtgt |
| 753 | tttcattcaa ctgttgcctc cggtt |
| 754 | taacatttca ttcaactgtt gcctc |
| 755 | ttgtgttgaa tcctttaaca tttca |
| 756 | tcttccttag cttccagcca ttgtg |
| 757 | cttagcttcc agccattgtg ttgaa |
| 758 | gtcctaagac ctgctcagct tcttc |
| 759 | ctgctcagct tcttccttag cttcc |
| 760 | ctcaagcttg gctctggcct gtcct |
| 761 | ggcctgtcct aagacctgct cagct |
| 762 | tagggaccct ccttccatga ctcaa |
| 763 | tttggattgc atctactgta taggg |
| 764 | accctccttc catgactcaa gcttg |
| 765 | cttggtttct gtgattttct tttgg |
| 766 | atctactgta tagggaccct ccttc |
| 767 | ctaaccttgg tttctgtgat tttct |
| 768 | tttcttttgg attgcatcta ctgta |
| 769 | tgatactaac cttggtttct gtgat |
| 770 | atctttgata ctaaccttgg tttct |
| 771 | aaggtatctt tgatactaac cttgg |
| 772 | ttaaaaaggt atctttgata ctaac |
| 773 | ataaaaggaa aaataaatat |
| 774 | gaataaaagg aaaaataaat |
| 775 | aactagaata aaaggaaaaa |
| 776 | ctttcaacta gaataaaagg |
| 777 | gaattctttc aactagaata |
| 778 | attctgaatt ctttcaacta |
| 779 | tacttcatcc cactgattct |
| 780 | ctgaaggtgt tcttgtact |
| 781 | ctgttgcctc cggttctgaa |
| 782 | taacatttca ttcaactgtt |
| 783 | ttgtgttgaa tcctttaaca |
| 784 | cttagcttcc agccattgtg |
| 785 | ctgctcagct tcttccttag |
| 786 | ggcctgtcct aagacctgct |
| 787 | ctcaagcttg gctctggcct |
| 788 | accctccttc catgactcaa |
| 789 | atctactgta tagggaccct |
| 790 | tttcttttgg attgcatcta |
| 791 | cttggtttct gtgattttct |
| 792 | ctaaccttgg tttctgtgat |
| 793 | tgatactaac cttggtttct |
| 794 | atctttgata ctaaccttgg |
| 795 | aaggtatctt tgatactaac |
| 796 | ttaaaaaggt atctttgata |
| 797 | ctatagattt ttatgagaaa gaga |
| 798 | aactgctata gatttttatg agaaa |
| 799 | tggccaactg ctatagattt ttatg |
| 800 | gtctttggcc aactgctata gattt |
| 801 | cggaggtctt tggccaactg ctata |
| 802 | actggcggag gtctttggcc aactg |
| 803 | tttgtctgcc actggcggag gtctt |
| 804 | agtcatttgc cacatctaca tttgt |
| 805 | tttgccacat ctacatttgt ctgcc |
| 806 | ccggagaagt ttcagggcca agtca |
| 807 | gtatcatctg cagaataatc ccgga |
| 808 | taatcccgga gaagtttcag ggcca |
| 809 | ttatcatgtg gacttttctg gtatc |
| 810 | agaggcattg atattctctg ttatc |
| 811 | atgtggactt ttctggtatc atctg |
| 812 | cttttatgaa tgcttctcca agagg |
| 813 | atattctctg ttatcatgtg gactt |
| 814 | catacctttt atgaatgctt ctcca |
| 815 | ctccaagagg cattgatatt ctctg |
| 816 | taattcatac cttttatgaa tgctt |
| 817 | taatgtaatt catacctttt atgaa |
| 818 | agaaataatg taattcatac ctttt |
| 819 | gttttagaaa taatgtaatt catac |
| 820 | gatttttatg agaaagaga |
| 821 | ctatagattt ttatgagaaa |
| 822 | aactgctata gatttttatg |
| 823 | tggccaactg ctatagattt |
| 824 | gtctttggcc aactgctata |
| 825 | cggaggtctt tggccaactg |
| 826 | tttgtctgcc actggcggag |
| 827 | tttgccacat ctacatttgt |
| 828 | ttcagggcca agtcatttgc |
| 829 | taatcccgga gaagtttcag |
| 830 | gtatcatctg cagaataatc |
| 831 | atgtggactt ttctggtatc |
| 832 | atattctctg ttatcatgtg |
| 833 | ctccaagagg cattgatatt |
| 834 | cttttatgaa tgcttctcca |
| 835 | catacctttt atgaatgctt |
| 836 | taattcatac cttttatgaa |
| 837 | taatgtaatt catacctttt |
| 838 | agaaataatg taattcatac |
| 839 | gttttagaaa taatgtaatt |
| 840 | ctgcaaagga ccaaatgttc agatg |
| 841 | tcaccctgca aaggaccaaa tgttc |
| 842 | ctcactcacc ctgcaaagga ccaaa |
| 843 | tctcgctcac tcaccctgca aagga |
| 844 | cagcctctcg ctcactcacc ctgca |
| 845 | caaagcagcc tctcgctcac tcacc |
| 846 | tcttccaaag cagcctctcg ctcac |
| 847 | tctatgagtt tcttccaaag cagcc |
| 848 | gttgcagtaa tctatgagtt tcttc |
| 849 | gaactgttgc agtaatctat gagtt |
| 850 | ttccaggtcc agggggaact gttgc |
| 851 | gtaagccagg caagaaactt ttcca |
| 852 | ccaggcaaga aacttttcca ggtcc |
| 853 | tggcagttgt ttcagcttct gtaag |
| 854 | ttcagcttct gtaagccagg caaga |
| 855 | ggtagcatcc tgtaggacat tggca |
| 856 | gacattggca gttgtttcag cttct |
| 857 | tctaggagcc tttccttacg ggtag |
| 858 | cttttactcc cttggagtct tctag |
| 859 | gagcctttcc ttacgggtag catcc |
| 860 | ttgccattgt ttcatcagct ctttt |
| 861 | cttggagtct tctaggagcc tttcc |
| 862 | cttacttgcc attgtttcat cagct |
| 863 | cagctctttt actcccttgg agtct |
| 864 | cctgacttac ttgccattgt ttcat |
| 865 | aaatgcctga cttacttgcc attgt |
| 866 | agcggaaatg cctgacttac ttgcc |
| 867 | gctaaagcgg aaatgcctga cttac |
| 868 | aaggaccaaa tgttcagatg |
| 869 | ctgcaaagga ccaaatgttc |
| 870 | tcaccctgca aaggaccaaa |
| 871 | ctcactcacc ctgcaaagga |
| 872 | tctcgctcac tcaccctgca |
| 873 | cagcctctcg ctcactcacc |
| 874 | caaagcagcc tctcgctcac |
| 875 | tctatgagtt tcttccaaag |
| 876 | gaactgttgc agtaatctat |
| 877 | ttccaggtcc agggggaact |
| 878 | ccaggcaaga aacttttcca |
| 879 | ttcagcttct gtaagccagg |
| 880 | gacattggca gttgtttcag |
| 881 | ggtagcatcc tgtaggacat |
| 882 | gagcctttcc ttacgggtag |
| 883 | cttggagtct tctaggagcc |
| 884 | cagctctttt actcccttgg |
| 885 | ttgccattgt ttcatcagct |
| 886 | cttacttgcc attgtttcat |
| 887 | cctgacttac ttgccattgt |
| 888 | aaatgcctga cttacttgcc |
| 889 | agcggaaatg cctgacttac |
| 890 | gctaaagcgg aaatgcctga |
| 891 | ccactcagag ctcagatctt ctaacttcc |
| 892 | gggatccagt atacttacag gctcc |
| 893 | cttccactca gagctcagat cttctaa |
| 894 | acatcaagga agatggcatt tctagtttgg |
| 895 | ctccaacatc aaggaagatg gcatttctag |
| 896 | ttctgtccaa gcccggttga aatc |
| 897 | cacccaccat caccctcygt g |
| 898 | atcatctcgt tgatatcctc aa |
| 899 | acatcaagga agatggcatt tctag |
| 900 | accagagtaa cagtctgagt aggagc |
| 901 | tcaaggaaga tggcatttct |
| 902 | cctctgtgat tttataactt gat |
| 903 | atcatttttt ctcatacctt ctgct |
| 904 | ctcatacctt ctgcttgatg atc |
| 905 | tggcatttct agtttgg |
| 906 | ccagagcagg tacctccaac atc |
| 907 | cgccgccatt tctcaacag |
| 908 | tgtttttgag gattgctgaa |
| 909 | gctgaattat ttcttcccc |
| 910 | gcccaatgcc atcctgg |
| 911 | ccaatgccat cctggagttc ctgtaa |
| 912 | cattcaactg ttgcctccgg ttctgaaggt g |
| 913 | ctgttgcctc cggttctg |
| 914 | attctttcaa ctagaataaa ag |
| 915 | gccatcctgg agttcctgta agataccaaa |
| 916 | ccaatgccat cctggagttc ctgtaagata |
| 917 | gccgctgccc aatgccatcc tggagttcct |
| 918 | gtttgccgct gcccaatgcc atcctggagt |
| 919 | caacagtttg ccgctgccca atgccatcct |
| 920 | ctgacaacag tttgccgctg cccaatgcca |
| 921 | tgttctgaca acagtttgcc gctgcccaat |
| 922 | caatgttctg acaacagttt gccgctgccc |
| 923 | cattcaatgt tctgacaaca gtttgccgct |
| 924 | tatttcttcc ccagttgcat tcaatgttct |
| 925 | gctgaattat ttcttcccca gttgcattca |
| 926 | ggattgctga attatttctt ccccagttgc |
| 927 | tttgaggatt gctgaattat ttcttcccca |
| 928 | gtacttcatc ccactgattc tgaattcttt |
| 929 | tcttgtactt catcccactg attctgaatt |
| 930 | tgttcttgta cttcatccca ctgattctga |
| 931 | cggttctgaa ggtgttcttg tacttcatcc |
| 932 | ctccggttct gaaggtgttc ttgtacttca |
| 933 | tgcctccggt tctgaaggtg ttcttgtact |
| 934 | tgttgcctcc ggttctgaag gtgttcttgt |
| 935 | aactgttgcc tccggttctg aaggtgttct |
| 936 | ttcaactgtt gcctccggtt ctgaaggtgt |
| 937 | ggccaaacct cggcttacct gaaat |
| 938 | cagatctgtc aaatcgcctg cagg |
| 939 | caacagatct gtcaaatcgc ctgcagg |
| 940 | ctcaacagat ctgtcaaatc gcctgcagg |
| 941 | gtgtctttct gagaaactgt tcagc |
| 942 | gagaaactgt tcagcttctg ttagccac |
| 943 | gaaactgttc agcttctgtt agccactg |
| 944 | ctgttcagct tctgttagcc actg |
| 945 | atctgtcaaa tcgcctgcag |
| 946 | tttgtgtctt tctgagaaac |
| 947 | tgttcagctt ctgttagcca ctga |
| 948 | gatctgtcaa atcgcctgca ggtaa |
| 949 | aaactgttca gcttctgtta gccac |
| 950 | ttgtgtcttt ctgagaaact gttca |
| 951 | caacagatct gtcaaatcgc ctgcag |
| 952 | cagatctgtc aaatcgcctg caggta |
| 953 | ctgttcagct tctgttagcc actgatt |
| 954 | gaaactgttc agcttctgtt agccactgat t |
| 955 | agaaactgtt cagcttctgt tagcca |
| 956 | cttggacaga acttaccgac tgg |
| 957 | gtttcttcca aagcagcctc tcg |
| 958 | gcaggatttg gaacagaggc g |
| 959 | catctacatt tgtctgccac tgg |
| 960 | caatgctcct gacctctgtg c |
| 961 | gctcttttcc aggttcaagt gg |
| 962 | gtctacaaca aagctcaggt cg |
| 963 | gcaatgttat ctgcttcctc caacc |
| 964 | gctttgttgt agactatctt ttatattc |
| 965 | ccgacctgag ctttgttgta gactatct |
| 966 | cttcctgtag cttcaccctt tccacagg |
| 967 | gctgggagag agcttcctgt agcttcac |
| 968 | tgttacctac ccttgtcggt ccttgtac |
| 969 | ctatgaataa tgtcaatccg acctgagc |
| 970 | ctgctgtctt cttgctatga ataatgtc |
| 971 | ggcgttgcac tttgcaatgc tgctgtct |
| 972 | ttggaaatca agctgggaga gagcttcc |
| 973 | ctttttccca ttggaaatca agctggga |
| 974 | gtcggtcctt gtacattttg ttaacttt |
| 975 | ctacccttgt cggtccttgt acattttg |
| 976 | gacctgagct ttgttgtaga ctatcttt |
| 977 | gtcaatccga cctgagcttt gttgtaga |
| 978 | taatgtcaat ccgacctgag ctttgttg |
| 979 | cttgctatga ataatgtcaa tccgacc |
| 980 | gtcttcttgc tatgaataat gtcaatcc |
| 981 | gcactttgca atgctgctgt cttcttgc |
| 982 | ccacaggcgt tgcactttgc aatgctgc |
| 983 | agcttcaccc tttccacagg cgttgcac |
| 984 | tcaccctttc cacaggcgtt gca |
| 985 | ggagagagct tcctgtagct |
| 986 | tcccattgga aatcaagctg ggagagag |
| 987 | tatatgtgtt acctaccctt gtcggtcc |
| 988 | gccatcctgg agttcctgta agatacc |
| 989 | gagttcctgt aagataccaa aaagg |
| 990 | gcccaatgcc atcctggagt tcctg |
| 991 | ccaatgccat cctggagttc ct |
| 992 | aatgccatcc tggagttcct gtaa |
| 993 | cctggagttc ctgtaagata ccaaa |
| 994 | tgccatcctg gagttcctgt aagat |
| 995 | tcctggagtt cctgtaagat ac |
| 996 | ccatcctgga gttcctgtaa gatac |
| 997 | cccaatgcca tcctggagtt cctgtaaga |
| 998 | ccgctgccca atgccatcct ggagttcc |
| 999 | caatgccatc ctggagttcc tgtaagatac |
| 1000 | cccaatgcca tcctggagtt cctgtaagat |
| 1001 | gccgctgccc aatgccatcc tggagttcct |
| 1002 | aatgccatcc tggagttcct gtaagatacc |
| 1003 | ccgctgccca atgccatcct ggagttcctg |
| 1004 | tgccgctgcc caatgccatc ctggagttcc |
| 1005 | tgcccaatgc catcctggag ttcctgtaag |
| 1006 | caatgccatc ctggagttcc tgtaagat |
| 1007 | cccaatgcca tcctggagtt cctgtaag |
| 1008 | tgcccaatgc catcctggag ttcctgta |
| 1009 | gctgcccaat gccatcctgg agttcctg |
| 1010 | catcctggag ttcctgtaag atacc |
| 1011 | gccatcctgg agttcctgta agatacc |
| 1012 | gctgcccaat gccatcctgg agttc |
| 1013 | gcccaatgcc atcctggagt |
| 1014 | tgccgctgcc caatgccatc ctgga |
| 1015 | ctgcccaatg ccatcctgg |
| 1016 | cagtttgccg ctgcccaatg ccatcc |
| 1017 | acagtttgcc gctgcccaat gcca |
| 1018 | ctgacaacag tttgccgctg cccaa |
| 1019 | gcattcaatg ttctgacaac |
| 1020 | gaattatttc ttccccagtt gcattcaatg |
| 1021 | ctggcatctg tttttgagga ttgctgaatt |
| 1022 | ccagttgcat tcaatgttct gacaac |
| 1023 | ttgctgaatt atttcttccc cag |
| 1024 | tttttgagga ttgctgaatt atttcttcc |
| 1025 | tttcctgtag aatactggca tctgt |
| 1026 | cttcccaatt tttcctgtag aatactggca t |
| 1027 | ccaatttttc ctgtagaata ctggc |
| 1028 | caggcttccc aatttttcct gtagaatac |
| 1029 | ctcctgccac cgcagattca ggcttc |
| 1030 | gcagacctcc tgccaccgca gattc |
| 1031 | ttgtttgcag acctcctgcc accgcagatt c |
| 1032 | gctgtttgca gacctcctgc cacc |
| 1033 | gtttgcagac ctcctgccac cgcag |
| 1034 | cttttttctg tctgacagct gtttgcagac |
| 1035 | ctgtctgaca gctgtttgca g |
| 1036 | ctacctcttt tttctgtctg acagc |
| 1037 | tattagatct gtcgccctac ctctt |
| 1038 | cctattagat ctgtcgccct acctc |
| 1039 | cuuuaacaga aaagcauac |
| 1040 | ucuuuaacag aaaagcauac |
| 1041 | ccucuuuaac agaaaagcau ac |
| 1042 | aacuuccucu uuaacagaaa agcauac |
| 1043 | cuucuaacuu ccucuuuaac agaaaagcau ac |
| 1044 | ccucuuuaac agaaaa |
| 1045 | aacuuccucu uuaacagaaa ag |
| 1046 | aacuuccucu uuaacag |
| 1047 | gcucagaucu ucuaacuucc ucuuuaacag |
| 1048 | aacuuccucu uuaaca |
| 1049 | ccacucagag cucagaucuu cuaacuucc |
| 1050 | cucagagcuc agaucuu |
| 1051 | gcucuugaag uaaacgg |
| 1052 | aauagugguc aguccagg |
| 1053 | cuuacaggcu ccaauagugg uca |
| 1054 | guauacuuac aggcuccaau agugguca |
| 1055 | uccaguauac uuacaggcuc caauaguggu |
| 1056 | cuuacaggcu ccaauagu |
| 1057 | guauacuuac aggcuccaau agu |
| 1058 | uccaguauac uuacaggcuc caauagu |
| 1059 | uccaguauac uuacaggcuc ca |
| 1060 | gggauccagu auacuuacag gcucc |
| 1061 | uccaguauac uuacaggcu |
| 1062 | uccaguauac uuaca |
| 1063 | ctccaacatc aaggaagatg gcatttct |
| 1064 | catcaaggaa gatggcattt ctagt |
| 1065 | ggagctaaaa tattttgggt ttttgc |
| 1066 | ttttctcata ccttctgctt gatga |
| 1067 | aggtacctcc aacatcaagg aagatgg |
| 1068 | ctccaacatc aaggaagatg gcatt |
| 1069 | ctccaacatc aaggaagatg gcatttct |
| 1070 | ctccaacatc aaggaagatg gcatttctag |
| 1071 | aaggaagatg gcatttctag tttgg |
| 1072 | cagtctgagt aggagctaaa atatt |
| 1073 | gagtaggagc taaaatattt tgggt |
| 1074 | cugaauucuu ucaacuagaa uaaaa |
| 1075 | gccauugugu ugaauccuuu aacauuuc |
| 1076 | ccaugacuca agcuuggcuc uggcc |
| 1077 | cccuauacag uagaugcaau |
| 1078 | uugauacuaa ccuugguuuc ugug |
| 1079 | caactgttgc ctccggttct gaag |
| 1080 | ggaccctcct tccatgactc aagc |
| 1081 | ggtatctttg atactaacct tggtttc |
| 1082 | gcccaaugcc auccugg |
| 1083 | cccauuuugu gaauguuuuc uuuu |
| 1084 | uugugcauuu acccauuuug ug |
| 1085 | uauccucuga augucgcauc |
| 1086 | gguuauccuc ugaaugucgc |
| 1087 | gagccuuuuu ucuucuuug |
| 1088 | uccuuucguc ucugggcuc |
| 1089 | cuccucuuuc uucuucugc |
| 1090 | cuucgaaacu gagcaaauuu |
| 1091 | cuugugagac augagug |
| 1092 | cagagacucc ucuugcuu |
| 1093 | ugcugcuguc uucuugcu |
| 1094 | uuguuaacuu uuucccauu |
| 1095 | cgccgccauu ucucaacag |
| 1096 | uuuguauuua gcauguuccc |
| 1097 | gcugaauuau uucuucccc |
| 1098 | cugcuuccuc caacc |
| 1099 | gcuuuucuuu uaguugcugc |
| 1100 | ucuugcucuu cugggcuu |
| 1101 | cuugagcuua uuuucaaguu u |
| 1102 | uuucuccuug uuucuc |
| 1103 | ccauaaauuu ccaacugauu c |
| 1104 | cuuccacauc cgguuguuu |
| 1105 | guggcugguu uuuccuugu |
| 1106 | cucagagcuc agaucuu |
| 1107 | ggcugcuuug cccuc |
| 1108 | ucaaggaaga uggcauuucu |
| 1109 | ccucugugau uuuauaacuu gau |
| 1110 | cuguugccuc cgguucug |
| 1111 | uuggcucugg ccuguccu |
| 1112 | gaaaauugug cauuuaccca uuuu |
| 1113 | cuuccuggau ggcuucaau |
| 1114 | guacauuaag auggacuuc |
| 1115 | ccauuacagu ugucuguguu |
| 1116 | uaaucugccu cuucuuuugg |
| 1117 | ucugcuggca ucuugc |
| 1118 | ccaucuguua gggucugug |
| 1119 | ucugugccaa uaugcgaauc |
| 1120 | uuaaaugucu caaguucc |
| 1121 | guaguucccu ccaacg |
| 1122 | cauguaguuc ccucc |
| 1123 | uguuaacuuu uucccauugg |
| 1124 | cauuuuguua acuuuuuccc |
| 1125 | ucuguuuuug aggauugc |
| 1126 | ccaccgcaga uucaggc |
| 1127 | uuugcagacc uccugcc |
| 1128 | gaaauucuga caagauauuc u |
| 1129 | uaaaacaaau ucauu |
| 1130 | uccagguuca agugggauac |
| 1131 | uuccagguuc aagug |
| 1132 | ucaagcuuuu cuuuuag |
| 1133 | cugacaagau auucuu |
| 1134 | agguucaagu gggauacua |
| 1135 | uccaguuuca uuuaauuguu ug |
| 1136 | cugcuugagc uuauuuucaa guu |
| 1137 | agcacuuaca agcacgggu |
| 1138 | uucaaguuua ucuugcucuu c |
| 1139 | ggucuuuuau uugagcuuc |
| 1140 | cuucaagcuu uuuuucaagc u |
| 1141 | gcuucaauuu cuccuuguu |
| 1142 | uuuauuugag cuucaauuu |
| 1143 | gcugcccaag gucuuuu |
| 1144 | cuucaagguc uucaagcuuu u |
| 1145 | uaacugcucu ucaaggucuu c |
| 1146 | gaaagccagu cgguaaguuc |
| 1147 | cacccaccau caccc |
| 1148 | ugauauccuc aaggucaccc |
| 1149 | uugcuggucu uguuuuuc |
| 1150 | ccguaaugau uguucu |
| 1151 | uacauuuguc ugccacugg |
| 1152 | cccggagaag uuucaggg |
| 1153 | cuguugcagu aaucuaugag |
| 1154 | ugccauuguu ucaucagcuc uuu |
| 1155 | ugcaguaauc uaugaguuuc |
| 1156 | uccuguagga cauuggcagu |
| 1157 | gagucuucua ggagccuu |
| 1158 | uuuuuuggcu guuuucaucc |
| 1159 | guucacucca cuugaaguuc |
| 1160 | ccuuccaggg aucucagg |
| 1161 | uaggugccug ccggcuu |
| 1162 | cugaacugcu ggaaagucgc c |
| 1163 | uucagcugua gccacacc |
| 1164 | uucuuuaguu uucaauuccc uc |
| 1165 | gaguuucucu aguccuucc |
| 1166 | caauuuuucc cacucaguau u |
| 1167 | uugaaguucc uggagucuu |
| 1168 | guucucuuuc agaggcgc |
| 1169 | gugcugaggu uauacggug |
| 1170 | gucccugugg gcuucaug |
| 1171 | gugcugagau gcuggacc |
| 1172 | uggcucucuc ccaggg |
| 1173 | gggcacuuug uuuggcg |
| 1174 | ggucccagca aguuguuug |
| 1175 | guagagcucu gucauuuugg g |
| 1176 | gccagaaguu gaucagagu |
| 1177 | ucuacuggcc agaaguug |
| 1178 | ugaguaucau cgugugaaag |
| 1179 | gcauaauguu caaugcgug |
| 1180 | gauccauugc uguuuucc |
| 1181 | gagaugcuau cauuuagaua a |
| 1182 | cuggcucagg ggggagu |
| 1183 | uccccucuuu ccucacucu |
| 1184 | ccuuuauguu cgugcugcu |
| 1185 | ggcggccuuu guguugac |
| 1186 | gagagguaga aggagagga |
| 1187 | auaggcugac ugcugucgg |
| 1188 | uuguguccug gggagga |
| 1189 | ugcuccauca ccuccucu |
| 1190 | gcuuuccagg gguauuuc |
| 1191 | cauuggcuuu ccagggg |
| 1192 | cccauuuugu gaauguuuuc uuuu |
| 1193 | uugugcauuu acccauuuug ug |
| 1194 | gaaaauugug cauuuaccca uuuu |
| 1195 | cuuccuggau ggcuucaau |
| 1196 | guacauuaag auggacuuc |
| 1197 | ccauuacagu ugucuguguu |
| 1198 | uaaucugccu cuucuuuugg |
| 1199 | ucugcuggca ucuugc |
| 1200 | uauccucuga augucgcauc |
| 1201 | gguuauccuc ugaaugucgc |
| 1202 | ccaucuguua gggucugug |
| 1203 | ucugugccaa uaugcgaauc |
| 1204 | uuaaaugucu caaguucc |
| 1205 | guaguucccu ccaacg |
| 1206 | cauguaguuc ccucc |
| 1207 | gagccuuuuu ucuucuuug |
| 1208 | uccuuucauc ucugggcuc |
| 1209 | cuccucuuuc uucuucugc |
| 1210 | cuucgaaacu gagcaaauuu |
| 1211 | cuugugagac augagug |
| 1212 | cagagacucc ucuugcuu |
| 1213 | ugcugcuguc uucuugcu |
| 1214 | uuguuaacuu uuucccauu |
| 1215 | uguuaacuuu uucccauugg |
| 1216 | cauuuuguua acuuuuuccc |
| 1217 | cuguagcuuc acccuuucc |
| 1218 | cgccgccauu ucucaacag |
| 1219 | uuuguauuua gcauguuccc |
| 1220 | gcugaauuau uucuucccc |
| 1221 | uuuuucuguc ugacagcug |
| 1222 | ucuguuuuug aggauugc |
| 1223 | ccaccgcaga uucaggc |
| 1224 | gcccaaugcc auccugg |
| 1225 | uuugcagacc uccugcc |
| 1226 | cugcuuccuc caacc |
| 1227 | guuaucugcu uccuccaacc |
| 1228 | gcuuuucuuu uaguugcugc |
| 1229 | uuaguugcug cucuu |
| 1230 | gaaauucuga caagauauuc u |
| 1231 | uaaaacaaau ucauu |
| 1232 | uccagguuca agugggauac |
| 1233 | uuccagguuc aagug |
| 1234 | ucaagcuuuu cuuuuag |
| 1235 | cugacaagau auucuu |
| 1236 | agguucaagu gggauacua |
| 1237 | ucuugcucuu cugggcuu |
| 1238 | cuugagcuua uuuucaaguu u |
| 1239 | uccaguuuca uuuaauuguu ug |
| 1240 | cugcuugagc uuauuuucaa guu |
| 1241 | agcacuuaca agcacgggu |
| 1242 | uucaaguuua ucuugcucuu c |
| 1243 | uuucuccuug uuucuc |
| 1244 | uuauaaauuu ccaacugauu c |
| 1245 | ggucuuuuau uugagcuuc |
| 1246 | cuucaagcuu uuuuucaagc u |
| 1247 | gcuucaauuu cuccuuguu |
| 1248 | uuuauuugag cuucaauuu |
| 1249 | gcugcccaag gucuuuu |
| 1250 | cuucaagguc uucaagcuuu u |
| 1251 | uaacugcucu ucaaggucuu c |
| 1252 | cuuccacauc cgguuguuu |
| 1253 | guggcugguu uuuccuugu |
| 1254 | cucagagcuc agaucuu |
| 1255 | ggcugcuuug cccuc |
| 1256 | ucaaggaaga uggcauuucu |
| 1257 | gaaagccagu cgguaaguuc |
| 1258 | cacccaccau caccc |
| 1259 | ccucugugau uuuauaacuu gau |
| 1260 | ugauauccuc aaggucaccc |
| 1261 | uugcuggucu uguuuuuc |
| 1262 | ccguaaugau uguucu |
| 1263 | cuguugccuc cgguucug |
| 1264 | uuggcucugg ccuguccu |
| 1265 | uacauuuguc ugccacugg |
| 1266 | cccggagaag uuucaggg |
| 1267 | cuguugcagu aaucuaugag |
| 1268 | ugccauuguu ucaucagcuc uuu |
| 1269 | ugcaguaauc uaugaguuuc |
| 1270 | uccuguagga cauuggcagu |
| 1271 | gagucuucua ggagccuu |
| 1272 | uuuuuuggcu guuuucaucc |
| 1273 | guucacucca cuugaaguuc |
| 1274 | ccuuccaggg aucucagg |
| 1275 | uaggugccug ccggcuu |
| 1276 | cugaacugcu ggaaagucgc c |
| 1277 | uucagcugua gccacacc |
| 1278 | uucuuuaguu uucaauuccc uc |
| 1279 | gaguuucucu aguccuucc |
| 1280 | caauuuuucc cacucaguau u |
| 1281 | uugaaguucc uggagucuu |
| 1282 | guucucuuuc agaggcgc |
| 1283 | gugcugaggu uauacggug |
| 1284 | gucccugugg gcuucaug |
| 1285 | gugcugagau gcuggacc |
| 1286 | uggcucucuc ccaggg |
| 1287 | gggcacuuug uuuggcg |
| 1288 | ggucccagca aguuguuug |
| 1289 | guagagcucu gucauuuugg g |
| 1290 | gccagaaguu gaucagagu |
| 1291 | ucuacuggcc agaaguug |
| 1292 | ugaguaucau cgugugaaag |
| 1293 | gcauaauguu caaugcgug |
| 1294 | gauccauugc uguuuucc |
| 1295 | gagaugcuau cauuuagaua a |
| 1296 | cuggcucagg ggggagu |
| 1297 | uccccucuuu ccucacucu |
| 1298 | ccuuuauguu cgugcugcu |
| 1299 | ggcggccuuu guguugac |
| 1300 | gagagguaga aggagagga |
| 1301 | auaggcugac ugcugucgg |
| 1302 | uuguguccug gggagga |
| 1303 | ugcuccauca ccuccucu |
| 1304 | gcuuuccagg gguauuuc |
| 1305 | cauuggcuuu ccagggg |
| 1306 | cugacgucca gucuuuauc |
| 1307 | gggauuuucc gucugcuu |
| 1308 | ccgccauuuc ucaacag |
| 1309 | uucucaggaa uuugugucuu u |
| 1310 | caguuugccg cugccca |
| 1311 | guugcauuca auguucugac |
| 1312 | auuuuuccug uagaauacug g |
| 1313 | gcuggucuug uuuuucaa |
| 1314 | uggucuuguu uuucaaauuu |
| 1315 | gucuuguuuu ucaaauuuug |
| 1316 | cuuguuuuuc aaauuuuggg |
| 1317 | uguuuuucaa auuuugggc |
| 1318 | uccuauaagc ugagaaucug |
| 1319 | gccuucugca gucuucgg |
| 1320 | ccggttctga aggtgttctt gta |
| 1321 | tccggttctg aaggtgttct tgta |
| 1322 | ctccggttct gaaggtgttc ttgta |
| 1323 | cctccggttc tgaaggtgtt cttgta |
| 1324 | gcctccggtt ctgaaggtgt tcttgta |
| 1325 | tgcctccggt tctgaaggtg ttcttgta |
| 1326 | ccggttctga aggtgttctt gt |
| 1327 | tccggttctg aaggtgttct tgt |
| 1328 | ctccggttct gaaggtgttc ttgt |
| 1329 | cctccggttc tgaaggtgtt cttgt |
| 1330 | gcctccggtt ctgaaggtgt tcttgt |
| 1331 | tgcctccggt tctgaaggtg ttcttgt |
| 1332 | ccggttctga aggtgttctt g |
| 1333 | tccggttctg aaggtgttct tg |
| 1334 | ctccggttct gaaggtgttc ttg |
| 1335 | cctccggttc tgaaggtgtt cttg |
| 1336 | gcctccggtt ctgaaggtgt tcttg |
| 1337 | tgcctccggt tctgaaggtg ttcttg |
| 1338 | ccggttctga aggtgttctt |
| 1339 | tccggttctg aaggtgttct t |
| 1340 | ctccggttct gaaggtgttc tt |
| 1341 | cctccggttc tgaaggtgtt ctt |
| 1342 | gcctccggtt ctgaaggtgt tctt |
| 1343 | tgcctccggt tctgaaggtg ttctt |
| 1344 | ccggttctga aggtgttct |
| 1345 | tccggttctg aaggtgttct |
| 1346 | ctccggttct gaaggtgttc t |
| 1347 | cctccggttc tgaaggtgtt ct |
| 1348 | gcctccggtt ctgaaggtgt tct |
| 1349 | tgcctccggt tctgaaggtg ttct |
| 1350 | ccggttctga aggtgttc |
| 1351 | tccggttctg aaggtgttc |
| 1352 | ctccggttct gaaggtgttc |
| 1353 | cctccggttc tgaaggtgtt c |
| 1354 | gcctccggtt ctgaaggtgt tc |
| 1355 | tgcctccggt tctgaaggtg ttc |
| 1356 | cattcaactg ttgcctccgg ttctgaaggt g |
| 1357 | ttgcctccgg ttctgaaggt gttcttgtac |
| 1358 | aggatttgga acagaggcgt c |
| 1359 | gtctgccact ggcggaggtc |
| 1360 | catcaagcag aaggcaacaa |
| 1361 | gaagtttcag ggccaagtca |
| 1362 | cgggcttgga cagaacttac |
| 1363 | tccttacggg tagcatcctg |
| 1364 | ctgaaggtgt tcttgtactt catcc |
| 1365 | tgttgagaaa tggcggcgt |
| 1366 | cauucaacug uugccuccgg uucugaaggu g |
| 1367 | ucccacugau ucugaauucu uucaa |
| 1368 | cuucauccca cugauucuga auucu |
| 1369 | uuguacuuca ucccacugau ucuga |
| 1370 | uguucuugua cuucauccca cugau |
| 1371 | gaagguguuc uuguacuuca uccca |
| 1372 | guucugaagg uguucuugua cuuca |
| 1373 | cuccgguucu gaagguguuc uugua |
| 1374 | guugccuccg guucugaagg uguuc |
| 1375 | caacuguugc cuccgguucu gaagg |
| 1376 | ucauucaacu guugccuccg guucu |
| 1377 | acauuucauu caacuguugc cuccg |
| 1378 | cuuuaacauu ucauucaacu guugc |
| 1379 | gaauccuuua acauuucauu caacu |
| 1380 | guguugaauc cuuuaacauu ucauu |
| 1381 | ccauuguguu gaauccuuua acauu |
| 1382 | uccagccauu guguugaauc cuuua |
| 1383 | uagcuuccag ccauuguguu gaauc |
| 1384 | uuccuuagcu uccagccauu guguu |
| 1385 | gcuucuuccu uagcuuccag ccauu |
| 1386 | gcucagcuuc uuccuuagcu uccag |
| 1387 | gaccugcuca gcuucuuccu uagcu |
| 1388 | ccuaagaccu gcucagcuuc uuccu |
| 1389 | ccuguccuaa gaccugcuca gcuuc |
| 1390 | ucuggccugu ccuaagaccu gcuca |
| 1391 | uuggcucugg ccuguccuaa gaccu |
| 1392 | caagcuuggc ucuggccugu ccuaa |
| 1393 | ugacucaagc uuggcucugg ccugu |
| 1394 | uuccaugacu caagcuuggc ucugg |
| 1395 | ccuccuucca ugacucaagc uuggc |
| 1396 | gggacccucc uuccaugacu caagc |
| 1397 | guauagggac ccuccuucca ugacu |
| 1398 | cuacuguaua gggacccucc uucca |
| 1399 | ugcaucuacu guauagggac ccucc |
| 1400 | uggauugcau cuacuguaua gggac |
| 1401 | ucuuuuggau ugcaucuacu guaua |
| 1402 | gauuuucuuu uggauugcau cuacu |
| 1403 | ucugugauuu ucuuuuggau ugcau |
| 1404 | ugguuucugu gauuuucuuu uggau |
| 1405 | ccuuagcuuc cagccauugu guuga |
| 1406 | ucuuccuuag cuuccagcca uugug |
| 1407 | ggcucuggcc uguccuaaga ccugc |
| 1408 | agcuuggcuc uggccugucc uaaga |
| 1409 | cucaagcuug gcucuggccu guccu |
| 1410 | gacccuccuu ccaugacuca agcuu |
| 1411 | auagggaccc uccuuccaug acuca |
| 1412 | cuguauaggg acccuccuuc cauga |
| 1413 | ugugauuuuc uuuuggauug caucu |
| 1414 | guuucuguga uuuucuuuug gauug |
| 1415 | cuugguuucu gugauuuucu uuugg |
| 1416 | ccgguucuga agguguucuu guacu |
| 1417 | uccgguucug aagguguucu uguac |
| 1418 | ccuccgguuc ugaagguguu cuugu |
| 1419 | gccuccgguu cugaaggugu ucuug |
| 1420 | ugccuccggu ucugaaggug uucuu |
| 1421 | uugccuccgg uucugaaggu guucu |
| 1422 | uguugccucc gguucugaag guguu |
| 1423 | cuguugccuc cgguucugaa ggugu |
| 1424 | acuguugccu ccgguucuga aggug |
| 1425 | aacuguugcc uccgguucug aaggu |
| 1426 | uguugccucc gguucugaag guguucuugu |
| 1427 | gguucugaag guguucuugu |
| 1428 | uccgguucug aagguguucu |
| 1429 | ccuccgguuc ugaagguguu |
| 1430 | uugccuccgg uucugaaggu |
| 1431 | uguugccucc gguucugaag |
| 1432 | uucugaaggu guucuugu |
| 1433 | cgguucugaa gguguucu |
| 1434 | cuccgguucu gaaggugu |
| 1435 | ugccuccggu ucugaagg |
| 1436 | uguugccucc gguucuga |
| 1437 | uucugaaggu guucu |
| 1438 | uccgguucug aaggu |
| 1439 | uugccuccgg uucug |
| 1440 | cuguugccuc cgguucug |
| 1441 | caatgccatc ctggagttcc t |
| 1442 | ccaatgccat cctggagttc c |
| 1443 | cccaatgcca tcctggagtt c |
| 1444 | gcccaatgcc atcctggagt t |
| 1445 | tgcccaatgc catcctggag t |
| 1446 | cccaatgcca tcctggagtt cctgt |
| 1447 | cagtttgccg ctgcccaatg ccatcctgga |
| 1448 | ccaatgccat cctggagttc |
| 1449 | cccaatgcca tcctggagtt |
| 1450 | cccaatgcca tcctggagtt c |
| 1451 | gcugcccaau gccauccugg aguuc |
| 1452 | uugccgcugc ccaaugccau ccugg |
| 1453 | acaguuugcc gcugcccaau gccau |
| 1454 | ugacaacagu uugccgcugc ccaau |
| 1455 | uguucugaca acaguuugcc gcugc |
| 1456 | uucaauguuc ugacaacagu uugcc |
| 1457 | uugcauucaa uguucugaca acagu |
| 1458 | cccaguugca uucaauguuc ugaca |
| 1459 | ucuuccccag uugcauucaa uguuc |
| 1460 | uuauuucuuc cccaguugca uucaa |
| 1461 | cugaauuauu ucuuccccag uugca |
| 1462 | gauugcugaa uuauuucuuc cccag |
| 1463 | uugaggauug cugaauuauu ucuuc |
| 1464 | uguuuuugag gauugcugaa uuauu |
| 1465 | gcaucuguuu uugaggauug cugaa |
| 1466 | uacuggcauc uguuuuugag gauug |
| 1467 | uuugccgcug cccaaugcca uccug |
| 1468 | gctcaggtcg gattgacatt |
| 1469 | gggcaactct tccaccagta |
| 1470 | cctgagaatt gggaacatgc |
| 1471 | ttgctgctct tttccaggtt |
| 1472 | agcagcctct cgctcactca c |
| 1473 | ttccaaagca gcctctcgct c |
| 1474 | ttcttccaaa gcagcctctc g |
| 1475 | agtttcttcc aaagcagcct c |
| 1476 | tttcttccaa agcagcctct c |
| 1477 | gtttcttcca aagcagcctc t |
| 1478 | gagtttcttc caaagcagcc t |
| 1479 | tgagtttctt ccaaagcagc c |
| 1480 | gcagccucuc gcucacucac c |
| 1481 | ccaaagcagc cucucgcuca c |
| 1482 | uucuuccaaa gcagccucuc g |
| 1483 | aucuaugagu uucuuccaaa g |
| 1484 | uguugcagua aucuaugagu u |
| 1485 | cagggggaac uguugcagua a |
| 1486 | uuuccagguc cagggggaac u |
| 1487 | gcaagaaacu uuuccagguc c |
| 1488 | uguaagccag gcaagaaacu u |
| 1489 | uuucagcuuc uguaagccag g |
| 1490 | uuggcaguug uuucagcuuc u |
| 1491 | cuguaggaca uuggcaguug u |
| 1492 | ggguagcauc cuguaggaca u |
| 1493 | cuuuccuuac ggguagcauc c |
| 1494 | uucuaggagc cuuuccuuac g |
| 1495 | ccuuggaguc uucuaggagc c |
| 1496 | ucuuuuacuc ccuuggaguc u |
| 1497 | uuucaucagc ucuuuuacuc c |
| 1498 | uugccauugu uucaucagcu |
| 1499 | uccuguagga cauuggcagu |
| 1500 | catggaagga gggtccctat |
| 1501 | ctgccggctt aattcatcat |
| 1502 | ataatgaaaa cgccgccatt t |
| 1503 | tcataatgaa aacgccgcca t |
| 1504 | atcataatga aaacgccgcc a |
| 1505 | tatcataatg aaaacgccgc c |
| 1506 | atatcataat gaaaacgccg c |
| 1507 | tatatcataa tgaaaacgcc g |
| 1508 | ttatatcata atgaaaacgc c |
| 1509 | tgaaaacgcc gccatttctc aacagatctg |
| 1510 | atcataatga aaacgccgcc |
| 1511 | tatcataatg aaaacgccgc |
| 1512 | tatcataatg aaaacgccgc c |
| 1513 | cucaacagau cugucaaauc gc |
| 1514 | gccgccauuu cucaacagau cu |
| 1515 | uaaugaaaac gccgccauuu cu |
| 1516 | uaucauaaug aaaacgccgc ca |
| 1517 | cuuuauauca uaaugaaaac gc |
| 1518 | gauuaaauau cuuuauauca ua |
| 1519 | guuagccacu gauuaaauau cu |
| 1520 | uucagcuucu guuagccacu ga |
| 1521 | ugagaaacug uucagcuucu gu |
| 1522 | ugugucuuuc ugagaaacug uu |
| 1523 | guucccaauu cucaggaauu ug |
| 1524 | uauuuagcau guucccaauu cu |
| 1525 | auaccauuug uauuuagcau gu |
| 1526 | ucagcuucug uuagccacug |
| 1527 | tccagtatac ttacaggctc c |
| 1528 | atccagtata cttacaggct c |
| 1529 | gatccagtat acttacaggc t |
| 1530 | ggatccagta tacttacagg c |
| 1531 | gggatccagt atacttacag g |
| 1532 | cttacaggct ccaatagtgg tcagt |
| 1533 | gggatccagt atacttacag gctcc |
| 1534 | aacaaccgga tgtggaagag |
| 1535 | ttggagatgg cagtttcctt |
| 1536 | cauuucucaa cagaucuguc aa |
| 1537 | aaaacgccgc cauuucucaa ca |
| 1538 | aauaucuuua uaucauaaug aa |
| 1539 | cuucuguuag ccacugauua aa |
| 1540 | aacuguucag cuucuguuag cc |
| 1541 | cuuucugaga aacuguucag cu |
| 1542 | gaauuugugu cuuucugaga aa |
| 1543 | cucaggaauu ugugucuuuc ug |
| 1544 | caauucucag gaauuugugu cu |
| 1545 | agcauguucc caauucucag ga |
| 1546 | gagtcttcta ggagcctt |
| 1547 | gtttcttcca aagcagcctc |
| 1548 | agtttcttcc aaagcagcct |
| 1549 | agtttcttcc aaagcagcct c |
| 1550 | ggatccagta tacttacagg |
| 1551 | gggatccagt atacttacag |
| 1552 | tgggatccag tatacttaca g |
| 1553 | atgggatcca gtatacttac a |
| 1554 | guggcuaaca gaagcu |
| 1555 | gggaacaugc uaaauac |
| 1556 | agacacaaau uccugaga |
| 1557 | cuguugagaa a |
| 1558 | ucagcuucug uuagccacug |
| 1559 | uucagcuucu guuagccacu |
| 1560 | uucagcuucu guuagccacu g |
| 1561 | ucagcuucug uuagccacug a |
| 1562 | uucagcuucu guuagccacu ga |
| 1563 | ucagcuucug uuagccacug a |
| 1564 | uucagcuucu guuagccacu ga |
| 1565 | ucagcuucug uuagccacug au |
| 1566 | uucagcuucu guuagccacu gau |
| 1567 | ucagcuucug uuagccacug auu |
| 1568 | uucagcuucu guuagccacu gauu |
| 1569 | ucagcuucug uuagccacug auua |
| 1570 | uucagcuucu guuagccacu gaua |
| 1571 | ucagcuucug uuagccacug auuaa |
| 1572 | uucagcuucu guuagccacu gauuaa |
| 1573 | ucagcuucug uuagccacug auuaaa |
| 1574 | uucagcuucu guuagccacu gauuaaa |
| 1575 | cagcuucugu uagccacug |
| 1576 | cagcuucugu uagccacuga u |
| 1577 | agcuucuguu agccacugau u |
| 1578 | cagcuucugu uagccacuga uu |
| 1579 | agcuucuguu agccacugau ua |
| 1580 | cagcuucugu uagccacuga uua |
| 1581 | agcuucuguu agccacugau uaa |
| 1582 | cagcuucugu uagccacuga uuaa |
| 1583 | agcuucuguu agccacugau uaaa |
| 1584 | cagcuucugu uagccacuga uuaaa |
| 1585 | agcuucuguu agccacugau uaaa |
| 1586 | agcuucuguu agccacugau |
| 1587 | gcuucuguua gccacugauu |
| 1588 | agcuucuguu agccacugau u |
| 1589 | gcuucuguua gccacugauu a |
| 1590 | agcuucuguu agccacugau ua |
| 1591 | gcuucuguua gccacugauu aa |
| 1592 | agcuucuguu agccacugau uaa |
| 1593 | gcuucuguua gccacugauu aaa |
| 1594 | agcuucuguu agccacugau uaaa |
| 1595 | gcuucuguua gccacugauu aaa |
| 1596 | ccauuuguau uuagcauguu ccc |
| 1597 | agauaccauu uguauuuagc |
| 1598 | gccauuucuc aacagaucu |
| 1599 | gccauuucuc aacagaucug uca |
| 1600 | auucucagga auuugugucu uuc |
| 1601 | ucucaggaau uugugucuuu c |
| 1602 | guucagcuuc uguuagcc |
| 1603 | cugauuaaau aucuuuauau c |
| 1604 | gccgccauuu cucaacag |
| 1605 | guauuuagca uguuccca |
| 1606 | caggaauuug ugucuuuc |
| 1607 | ucuguuagcc acugauuaaa u |
| 1608 | cgaccugagc uuuguuguag |
| 1609 | cgaccugagc uuuguuguag acuau |
| 1610 | ccugagcuuu guuguagacu auc |
| 1611 | cguugcacuu ugcaaugcug cug |
| 1612 | cuguagcuuc acccuuucc |
| 1613 | gagagagcuu ccuguagcuu cacc |
| 1614 | guccuuguac auuuuguuaa cuuuuuc |
| 1615 | ucagcuucug uuagccacug |
| 1616 | uucagcuucu guuagccacu |
| 1617 | uucagcuucu guuagccacu g |
| 1618 | ucagcuucug uuagccacug a |
| 1619 | uucagcuucu guuagccacu ga |
| 1620 | ucagcuucug uuagccacug a |
| 1621 | uucagcuucu guuagccacu ga |
| 1622 | ucagcuucug uuagccacug au |
| 1623 | uucagcuucu guuagccacu gau |
| 1624 | ucagcuucug uuagccacug auu |
| 1625 | uucagcuucu guuagccacu gauu |
| 1626 | ucagcuucug uuagccacug auua |
| 1627 | uucagcuucu guuagccacu gaua |
| 1628 | ucagcuucug uuagccacug auuaa |
| 1629 | uucagcuucu guuagccacu gauuaa |
| 1630 | ucagcuucug uuagccacug auuaaa |
| 1631 | uucagcuucu guuagccacu gauuaaa |
| 1632 | cagcuucugu uagccacug |
| 1633 | cagcuucugu uagccacuga u |
| 1634 | agcuucuguu agccacugau u |
| 1635 | cagcuucugu uagccacuga uu |
| 1636 | agcuucuguu agccacugau ua |
| 1637 | cagcuucugu uagccacuga uua |
| 1638 | agcuucuguu agccacugau uaa |
| 1639 | cagcuucugu uagccacuga uuaa |
| 1640 | agcuucuguu agccacugau uaaa |
| 1641 | cagcuucugu uagccacuga uuaaa |
| 1642 | agcuucuguu agccacugau uaaa |
| 1643 | agcuucuguu agccacugau |
| 1644 | gcuucuguua gccacugauu |
| 1645 | agcuucuguu agccacugau u |
| 1646 | gcuucuguua gccacugauu a |
| 1647 | agcuucuguu agccacugau ua |
| 1648 | gcuucuguua gccacugauu aa |
| 1649 | agcuucuguu agccacugau uaa |
| 1650 | gcuucuguua gccacugauu aaa |
| 1651 | agcuucuguu agccacugau uaaa |
| 1652 | gcuucuguua gccacugauu aaa |
| 1653 | ccauuuguau uuagcauguu ccc |
| 1654 | agauaccauu uguauuuagc |
| 1655 | gccauuucuc aacagaucu |
| 1656 | gccauuucuc aacagaucug uca |
| 1657 | auucucagga auuugugucu uuc |
| 1658 | ucucaggaau uugugucuuu c |
| 1659 | guucagcuuc uguuagcc |
| 1660 | cugauuaaau aucuuuauau c |
| 1661 | gccgccauuu cucaacag |
| 1662 | guauuuagca uguuccca |
| 1663 | caggaauuug ugucuuuc |
| 1664 | uuugccgcug cccaaugcca uccug |
| 1665 | auucaauguu cugacaacag uuugc |
| 1666 | ccaguugcau ucaauguucu gacaa |
| 1667 | caguugcauu caauguucug ac |
| 1668 | aguugcauuc aauguucuga |
| 1669 | gauugcugaa uuauuucuuc c |
| 1670 | gauugcugaa uuauuucuuc cccag |
| 1671 | auugcugaau uauuucuucc ccagu |
| 1672 | uugcugaauu auuucuuccc caguu |
| 1673 | ugcugaauua uuucuucccc aguug |
| 1674 | gcugaauuau uucuucccca guugc |
| 1675 | cugaauuauu ucuuccccag uugca |
| 1676 | ugaauuauuu cuuccccagu ugcau |
| 1677 | gaauuauuuc uuccccaguu gcauu |
| 1678 | aauuauuucu uccccaguug cauuc |
| 1679 | auuauuucuu ccccaguugc auuca |
| 1680 | uuauuucuuc cccaguugca uucaa |
| 1681 | uauuucuucc ccaguugcau ucaau |
| 1682 | auuucuuccc caguugcauu caaug |
| 1683 | uuucuucccc aguugcauuc aaugu |
| 1684 | uucuucccca guugcauuca auguu |
| 1685 | ucuuccccag uugcauucaa uguuc |
| 1686 | cuuccccagu ugcauucaau guucu |
| 1687 | uuccccaguu gcauucaaug uucug |
| 1688 | uccccaguug cauucaaugu ucuga |
| 1689 | ccccaguugc auucaauguu cugac |
| 1690 | cccaguugca uucaauguuc ugaca |
| 1691 | ccaguugcau ucaauguucu gacaa |
| 1692 | caguugcauu caauguucug acaac |
| 1693 | aguugcauuc aauguucuga caaca |
| 1694 | guugcauuca auguucugac aacag |
| 1695 | uugcauucaa uguucugaca acagu |
| 1696 | ugcauucaau guucugacaa caguu |
| 1697 | gcauucaaug uucugacaac aguuu |
| 1698 | cauucaaugu ucugacaaca guuug |
| 1699 | auucaauguu cugacaacag uuugc |
| 1700 | ucaauguucu gacaacaguu ugccg |
| 1701 | caauguucug acaacaguuu gccgc |
| 1702 | aauguucuga caacaguuug ccgcu |
| 1703 | auguucugac aacaguuugc cgcug |
| 1704 | uguucugaca acaguuugcc gcugc |
| 1705 | guucugacaa caguuugccg cugcc |
| 1706 | uucugacaac aguuugccgc ugccc |
| 1707 | ucugacaaca guuugccgcu gccca |
| 1708 | cugacaacag uuugccgcug cccaa |
| 1709 | ugacaacagu uugccgcugc ccaau |
| 1710 | gacaacaguu ugccgcugcc caaug |
| 1711 | acaacaguuu gccgcugccc aaugc |
| 1712 | caacaguuug ccgcugccca augcc |
| 1713 | aacaguuugc cgcugcccaa ugcca |
| 1714 | acaguuugcc gcugcccaau gccau |
| 1715 | caguuugccg cugcccaaug ccauc |
| 1716 | aguuugccgc ugcccaaugc caucc |
| 1717 | guuugccgcu gcccaaugcc auccu |
| 1718 | uuugccgcug cccaaugcca uccug |
| 1719 | uugccgcugc ccaaugccau ccugg |
| 1720 | ugccgcugcc caaugccauc cugga |
| 1721 | gccgcugccc aaugccaucc uggag |
| 1722 | ccgcugccca augccauccu ggagu |
| 1723 | cgcugcccaa ugccauccug gaguu |
| 1724 | gcuuuucuuu uaguugcugc ucuuu |
| 1725 | cuuuucuuuu aguugcugcu cuuuu |
| 1726 | uuuucuuuua guugcugcuc uuuuc |
| 1727 | uuucuuuuag uugcugcucu uuucc |
| 1728 | uucuuuuagu ugcugcucuu uucca |
| 1729 | ucuuuuaguu gcugcucuuu uccag |
| 1730 | cuuuuaguug cugcucuuuu ccagg |
| 1731 | uuuuaguugc ugcucuuuuc caggu |
| 1732 | uuuaguugcu gcucuuuucc agguu |
| 1733 | uuaguugcug cucuuuucca gguuc |
| 1734 | uaguugcugc ucuuuuccag guuca |
| 1735 | aguugcugcu cuuuuccagg uucaa |
| 1736 | guugcugcuc uuuuccaggu ucaag |
| 1737 | uugcugcucu uuuccagguu caagu |
| 1738 | ugcugcucuu uuccagguuc aagug |
| 1739 | gcugcucuuu uccagguuca agugg |
| 1740 | cugcucuuuu ccagguucaa guggg |
| 1741 | ugcucuuuuc cagguucaag uggga |
| 1742 | gcucuuuucc agguucaagu gggac |
| 1743 | cucuuuucca gguucaagug ggaua |
| 1744 | ucuuuuccag guucaagugg gauac |
| 1745 | cuuuuccagg uucaaguggg auacu |
| 1746 | uuuuccaggu ucaaguggga uacua |
| 1747 | uuuccagguu caagugggau acuag |
| 1748 | uuccagguuc aagugggaua cuagc |
| 1749 | uccagguuca agugggauac uagca |
| 1750 | ccagguucaa gugggauacu agcaa |
| 1751 | cagguucaag ugggauacua gcaau |
| 1752 | agguucaagu gggauacuag caaug |
| 1753 | gguucaagug ggauacuagc aaugu |
| 1754 | guucaagugg gauacuagca auguu |
| 1755 | uucaaguggg auacuagcaa uguua |
| 1756 | ucaaguggga uacuagcaau guuau |
| 1757 | caagugggau acuagcaaug uuauc |
| 1758 | aagugggaua cuagcaaugu uaucu |
| 1759 | agugggauac uagcaauguu aucug |
| 1760 | gugggauacu agcaauguua ucugc |
| 1761 | ugggauacua gcaauguuau cugcu |
| 1762 | gggauacuag caauguuauc ugcuu |
| 1763 | ggauacuagc aauguuaucu gcuuc |
| 1764 | gauacuagca auguuaucug cuucc |
| 1765 | auacuagcaa uguuaucugc uuccu |
| 1766 | uacuagcaau guuaucugcu uccuc |
| 1767 | acuagcaaug uuaucugcuu ccucc |
| 1768 | cuagcaaugu uaucugcuuc cucca |
| 1769 | uagcaauguu aucugcuucc uccaa |
| 1770 | agcaauguua ucugcuuccu ccaac |
| 1771 | gcaauguuau cugcuuccuc caacc |
| 1772 | caauguuauc ugcuuccucc aacca |
| 1773 | aauguuaucu gcuuccucca accau |
| 1774 | auguuaucug cuuccuccaa ccaua |
| 1775 | uguuaucugc uuccuccaac cauaa |
| 1776 | guuaucugcu uccuccaacc auaaa |
| 1777 | gcugcucuuu uccagguuc |
| 1778 | ucuuuuccag guucaagugg |
| 1779 | agguucaagu gggauacua |
| 1780 | cucagcucuu gaaguaaacg |
| 1781 | ccucagcucu ugaaguaaac |
| 1782 | ccucagcucu ugaaguaaac g |
| 1783 | auagugguca guccaggagc u |
| 1784 | caguccagga gcuaggucag g |
| 1785 | uaguggucag uccaggagcu agguc |
| 1786 | agagcaggua ccuccaacau caagg |
| 1787 | gagcagguac cuccaacauc aagga |
| 1788 | agcagguacc uccaacauca aggaa |
| 1789 | gcagguaccu ccaacaucaa ggaag |
| 1790 | cagguaccuc caacaucaag gaaga |
| 1791 | agguaccucc aacaucaagg aagau |
| 1792 | gguaccucca acaucaagga agaug |
| 1793 | guaccuccaa caucaaggaa gaugg |
| 1794 | uaccuccaac aucaaggaag auggc |
| 1795 | accuccaaca ucaaggaaga uggca |
| 1796 | ccuccaacau caaggaagau ggcau |
| 1797 | cuccaacauc aaggaagaug gcauu |
| 1798 | cuccaacauc aaggaagaug gcauuucuag |
| 1799 | uccaacauca aggaagaugg cauuu |
| 1800 | ccaacaucaa ggaagauggc auuuc |
| 1801 | caacaucaag gaagauggca uuucu |
| 1802 | aacaucaagg aagauggcau uucua |
| 1803 | acaucaagga agauggcauu ucuag |
| 1804 | acaucaagga agauggcauu ucuaguuugg |
| 1805 | acaucaagga agauggcauu ucuag |
| 1806 | caucaaggaa gauggcauuu cuagu |
| 1807 | aucaaggaag auggcauuuc uaguu |
| 1808 | ucaaggaaga uggcauuucu aguuu |
| 1809 | ucaaggaaga uggcauuucu |
| 1810 | caaggaagau ggcauuucua guuug |
| 1811 | aaggaagaug gcauuucuag uuugg |
| 1812 | aggaagaugg cauuucuagu uugga |
| 1813 | ggaagauggc auuucuaguu uggag |
| 1814 | gaagauggca uuucuaguuu ggaga |
| 1815 | aagauggcau uucuaguuug gagau |
| 1816 | agauggcauu ucuaguuugg agaug |
| 1817 | gauggcauuu cuaguuugga gaugg |
| 1818 | auggcauuuc uaguuuggag auggc |
| 1819 | uggcauuucu aguuuggaga uggca |
| 1820 | ggcauuucua guuuggagau ggcag |
| 1821 | gcauuucuag uuuggagaug gcagu |
| 1822 | cauuucuagu uuggagaugg caguu |
| 1823 | auuucuaguu uggagauggc aguuu |
| 1824 | uuucuaguuu ggagauggca guuuc |
| 1825 | uucuaguuug gagauggcag uuucc |
| 1826 | ccucuugauu gcuggucuug uuuuu |
| 1827 | cucuugauug cuggucuugu uuuuc |
| 1828 | ucuugauugc uggucuuguu uuuca |
| 1829 | cuugauugcu ggucuuguuu uucaa |
| 1830 | uugauugcug gucuuguuuu ucaaa |
| 1831 | ugauugcugg ucuuguuuuu caaau |
| 1832 | gauugcuggu cuuguuuuuc aaauu |
| 1833 | auugcugguc uuguuuuuca aauuu |
| 1834 | uugcuggucu uguuuuucaa auuuu |
| 1835 | ugcuggucuu guuuuucaaa uuuug |
| 1836 | gcuggucuug uuuuucaaau uuugg |
| 1837 | cuggucuugu uuuucaaauu uuggg |
| 1838 | uggucuuguu uuucaaauuu ugggc |
| 1839 | ggucuuguuu uucaaauuuu gggca |
| 1840 | gucuuguuuu ucaaauuuug ggcag |
| 1841 | ucuuguuuuu caaauuuugg gcagc |
| 1842 | cuuguuuuuc aaauuuuggg cagcg |
| 1843 | uuguuuuuca aauuuugggc agcgg |
| 1844 | uguuuuucaa auuuugggca gcggu |
| 1845 | guuuuucaaa uuuugggcag cggua |
| 1846 | uuuuucaaau uuugggcagc gguaa |
| 1847 | uuuucaaauu uugggcagcg guaau |
| 1848 | uuucaaauuu ugggcagcgg uaaug |
| 1849 | uucaaauuuu gggcagcggu aauga |
| 1850 | ucaaauuuug ggcagcggua augag |
| 1851 | caaauuuugg gcagcgguaa ugagu |
| 1852 | aaauuuuggg cagcgguaau gaguu |
| 1853 | aauuuugggc agcgguaaug aguuc |
| 1854 | auuuugggca gcgguaauga guucu |
| 1855 | ccauuguguu gaauccuuua acauu |
| 1856 | ccauuguguu gaauccuuua ac |
| 1857 | auuguguuga auccuuuaac |
| 1858 | ccuguccuaa gaccugcuca |
| 1859 | cuuuuggauu gcaucuacug uauag |
| 1860 | cauucaacug uugccuccgg uucug |
| 1861 | cuguugccuc cgguucugaa ggug |
| 1862 | cauucaacug uugccuccgg uucugaaggu g |
| 1863 | cugaaggugu ucuuguacuu caucc |
| 1864 | uguauaggga cccuccuucc augacuc |
| 1865 | aucccacuga uucugaauuc |
| 1866 | uuggcucugg ccuguccuaa ga |
| 1867 | aagaccugcu cagcuucuuc cuuagcuucc agcca |
| 1868 | ggagagagcu uccuguagcu |
| 1869 | ucacccuuuc cacaggcguu gca |
| 1870 | ugcacuuugc aaugcugcug ucuucuugcu au |
| 1871 | ucauaaugaa aacgccgcca uuucucaaca gaucu |
| 1872 | uuugugucuu ucugagaaac |
| 1873 | uuuagcaugu ucccaauucu caggaauuug |
| 1874 | uccuguagaa uacuggcauc |
| 1875 | ugcagaccuc cugccaccgc agauuca |
| 1876 | uugcagaccu ccugccaccg cagauucagg cuuc |
| 1877 | uguuuuugag gauugcugaa |
| 1878 | uguucugaca acaguuugcc gcugcccaau gccauccugg |
| 1879 | cucuuuucca gguucaagug ggauacuagc |
| 1880 | caagcuuuuc uuuuaguugc ugcucuuuuc c |
| 1881 | uauucuuuug uucuucuagc cuggagaaag |
| 1882 | cugcuuccuc caaccauaaa acaaauuc |
| 1883 | ccacucagag cucagaucuu cuaacuucc |
| 1884 | cuuccacuca gagcucagau cuucuaa |
| 1885 | caguccagga gcuaggucag gcugcuuugc |
| 1886 | ucuugaagua aacgguuuac cgccuuccac ucagagc |
| 1887 | uccaacuggg gacgccucug uuccaaaucc |
| 1888 | acuggggacg ccucuguucc a |
| 1889 | ccguaaugau uguucuagcc |
| 1890 | uuuugggcag cgguaaugag uucuu |
| 1891 | uuugggcagc gguaaugagu ucuuc |
| 1892 | uugggcagcg guaaugaguu cuucc |
| 1893 | ugggcagcgg uaaugaguuc uucca |
| 1894 | gggcagcggu aaugaguucu uccaa |
| 1895 | ggcagcggua augaguucuu ccaac |
| 1896 | gcagcgguaa ugaguucuuc caacu |
| 1897 | cagcgguaau gaguucuucc aacug |
| 1898 | agcgguaaug aguucuucca acugg |
| 1899 | gcgguaauga guucuuccaa cuggg |
| 1900 | cgguaaugag uucuuccaac ugggg |
| 1901 | gguaaugagu ucuuccaacu gggga |
| 1902 | guaaugaguu cuuccaacug gggac |
| 1903 | uaaugaguuc uuccaacugg ggacg |
| 1904 | aaugaguucu uccaacuggg gacgc |
| 1905 | augaguucuu ccaacugggg acgcc |
| 1906 | ugaguucuuc caacugggga cgccu |
| 1907 | gaguucuucc aacuggggac gccuc |
| 1908 | aguucuucca acuggggacg ccucu |
| 1909 | guucuuccaa cuggggacgc cucug |
| 1910 | uucuuccaac uggggacgcc ucugu |
| 1911 | ucuuccaacu ggggacgccu cuguu |
| 1912 | cuuccaacug gggacgccuc uguuc |
| 1913 | uuccaacugg ggacgccucu guucc |
| 1914 | gauugcuggu cuuguuuuuc |
| 1915 | ccucuugauu gcuggucuug |
| 1916 | gguaaugagu ucuuccaacu gg |
| 1917 | acuggggacg ccucuguucc |
| 1918 | ucaaggaaga uggcauuucu |
| 1919 | ggccaaaccu cggcuuaccu |
| 1920 | uuugccgcug cccaaugcca uccug |
| 1921 | auucaauguu cugacaacag uuugc |
| 1922 | ccaguugcau ucaauguucu gacaa |
| 1923 | caguugcauu caauguucug ac |
| 1924 | aguugcauuc aauguucuga |
| 1925 | gauugcugaa uuauuucuuc c |
| 1926 | gauugcugaa uuauuucuuc cccag |
| 1927 | auugcugaau uauuucuucc ccagu |
| 1928 | uugcugaauu auuucuuccc caguu |
| 1929 | ugcugaauua uuucuucccc aguug |
| 1930 | gcugaauuau uucuucccca guugc |
| 1931 | cugaauuauu ucuuccccag uugca |
| 1932 | ugaauuauuu cuuccccagu ugcau |
| 1933 | gaauuauuuc uuccccaguu gcauu |
| 1934 | aauuauuucu uccccaguug cauuc |
| 1935 | auuauuucuu ccccaguugc auuca |
| 1936 | uuauuucuuc cccaguugca uucaa |
| 1937 | uauuucuucc ccaguugcau ucaau |
| 1938 | auuucuuccc caguugcauu caaug |
| 1939 | uuucuucccc aguugcauuc aaugu |
| 1940 | uucuucccca guugcauuca auguu |
| 1941 | ucuuccccag uugcauucaa uguuc |
| 1942 | cuuccccagu ugcauucaau guucu |
| 1943 | uuccccaguu gcauucaaug uucug |
| 1944 | uccccaguug cauucaaugu ucuga |
| 1945 | ccccaguugc auucaauguu cugac |
| 1946 | cccaguugca uucaauguuc ugaca |
| 1947 | ccaguugcau ucaauguucu gacaa |
| 1948 | caguugcauu caauguucug acaac |
| 1949 | aguugcauuc aauguucuga caaca |
| 1950 | uccuguagaa uacuggcauc |
| 1951 | ugcagaccuc cugccaccgc agauuca |
| 1952 | uugcagaccu ccugccaccg cagauucagg cuuc |
| 1953 | guugcauuca auguucugac aacag |
| 1954 | uugcauucaa uguucugaca acagu |
| 1955 | ugcauucaau guucugacaa caguu |
| 1956 | gcauucaaug uucugacaac aguuu |
| 1957 | cauucaaugu ucugacaaca guuug |
| 1958 | auucaauguu cugacaacag uuugc |
| 1959 | ucaauguucu gacaacaguu ugccg |
| 1960 | caauguucug acaacaguuu gccgc |
| 1961 | aauguucuga caacaguuug ccgcu |
| 1962 | auguucugac aacaguuugc cgcug |
| 1963 | uguucugaca acaguuugcc gcugc |
| 1964 | guucugacaa caguuugccg cugcc |
| 1965 | uucugacaac aguuugccgc ugccc |
| 1966 | ucugacaaca guuugccgcu gccca |
| 1967 | cugacaacag uuugccgcug cccaa |
| 1968 | ugacaacagu uugccgcugc ccaau |
| 1969 | gacaacaguu ugccgcugcc caaug |
| 1970 | acaacaguuu gccgcugccc aaugc |
| 1971 | caacaguuug ccgcugccca augcc |
| 1972 | aacaguuugc cgcugcccaa ugcca |
| 1973 | acaguuugcc gcugcccaau gccau |
| 1974 | caguuugccg cugcccaaug ccauc |
| 1975 | aguuugccgc ugcccaaugc caucc |
| 1976 | guuugccgcu gcccaaugcc auccu |
| 1977 | uuugccgcug cccaaugcca uccug |
| 1978 | uugccgcugc ccaaugccau ccugg |
| 1979 | ugccgcugcc caaugccauc cugga |
| 1980 | gccgcugccc aaugccaucc uggag |
| 1981 | ccgcugccca augccauccu ggagu |
| 1982 | cgcugcccaa ugccauccug gaguu |
| 1983 | uguuuuugag gauugcugaa |
| 1984 | uguucugaca acaguuugcc gcugcccaau gccauccugg |
| 1985 | gcccaaugcc auccugg |
| 1986 | agagcaggua ccuccaacau caagg |
| 1987 | gagcagguac cuccaacauc aagga |
| 1988 | agcagguacc uccaacauca aggaa |
| 1989 | gcagguaccu ccaacaucaa ggaag |
| 1990 | cagguaccuc caacaucaag gaaga |
| 1991 | agguaccucc aacaucaagg aagau |
| 1992 | gguaccucca acaucaagga agaug |
| 1993 | guaccuccaa caucaaggaa gaugg |
| 1994 | uaccuccaac aucaaggaag auggc |
| 1995 | accuccaaca ucaaggaaga uggca |
| 1996 | ccuccaacau caaggaagau ggcau |
| 1997 | cuccaacauc aaggaagaug gcauu |
| 1998 | cuccaacauc aaggaagaug gcauuucuag |
| 1999 | uccaacauca aggaagaugg cauuu |
| 2000 | ccaacaucaa ggaagauggc auuuc |
| 2001 | caacaucaag gaagauggca uuucu |
| 2002 | aacaucaagg aagauggcau uucua |
| 2003 | acaucaagga agauggcauu ucuag |
| 2004 | acaucaagga agauggcauu ucuaguuugg |
| 2005 | acaucaagga agauggcauu ucuag |
| 2006 | caucaaggaa gauggcauuu cuagu |
| 2007 | aucaaggaag auggcauuuc uaguu |
| 2008 | ucaaggaaga uggcauuucu aguuu |
| 2009 | ucaaggaaga uggcauuucu |
| 2010 | caaggaagau ggcauuucua guuug |
| 2011 | aaggaagaug gcauuucuag uuugg |
| 2012 | aggaagaugg cauuucuagu uugga |
| 2013 | ggaagauggc auuucuaguu uggag |
| 2014 | gaagauggca uuucuaguuu ggaga |
| 2015 | aagauggcau uucuaguuug gagau |
| 2016 | agauggcauu ucuaguuugg agaug |
| 2017 | gauggcauuu cuaguuugga gaugg |
| 2018 | auggcauuuc uaguuuggag auggc |
| 2019 | uggcauuucu aguuuggaga uggca |
| 2020 | ggcauuucua guuuggagau ggcag |
| 2021 | gcauuucuag uuuggagaug gcagu |
| 2022 | cauuucuagu uuggagaugg caguu |
| 2023 | auuucuaguu uggagauggc aguuu |
| 2024 | uuucuaguuu ggagauggca guuuc |
| 2025 | uucuaguuug gagauggcag uuucc |
| 2026 | ccauuguguu gaauccuuua acauu |
| 2027 | ccauuguguu gaauccuuua ac |
| 2028 | auuguguuga auccuuuaac |
| 2029 | ccuguccuaa gaccugcuca |
| 2030 | cuuuuggauu gcaucuacug uauag |
| 2031 | cauucaacug uugccuccgg uucug |
| 2032 | cuguugccuc cgguucugaa ggug |
| 2033 | cauucaacug uugccuccgg uucugaaggu g |
| 2034 | cugaaggugu ucuuguacuu caucc |
| 2035 | uguauaggga cccuccuucc augacuc |
| 2036 | aucccacuga uucugaauuc |
| 2037 | uuggcucugg ccuguccuaa ga |
| 2038 | aagaccugcu cagcuucuuc cuuagcuucc agcca |
| 2039 | ugcauguucc agucguugug ugg |
| 2040 | cacuauucca gucaaauagg ucugg |
| 2041 | auuuaccaac cuucaggauc gagua |
| 2042 | ggccuaaaac acauacacau a |
| 2043 | ucagcuucug uuagccacug |
| 2044 | uucagcuucu guuagccacu |
| 2045 | uucagcuucu guuagccacu g |
| 2046 | ucagcuucug uuagccacug a |
| 2047 | uucagcuucu guuagccacu ga |
| 2048 | ucagcuucug uuagccacug a |
| 2049 | uucagcuucu guuagccacu ga |
| 2050 | ucagcuucug uuagccacug au |
| 2051 | uucagcuucu guuagccacu gau |
| 2052 | ucagcuucug uuagccacug auu |
| 2053 | uucagcuucu guuagccacu gauu |
| 2054 | ucagcuucug uuagccacug auua |
| 2055 | uucagcuucu guuagccacu gaua |
| 2056 | ucagcuucug uuagccacug auuaa |
| 2057 | uucagcuucu guuagccacu gauuaa |
| 2058 | ucagcuucug uuagccacug auuaaa |
| 2059 | uucagcuucu guuagccacu gauuaaa |
| 2060 | cagcuucugu uagccacug |
| 2061 | cagcuucugu uagccacuga u |
| 2062 | agcuucuguu agccacugau u |
| 2063 | cagcuucugu uagccacuga uu |
| 2064 | agcuucuguu agccacugau ua |
| 2065 | cagcuucugu uagccacuga uua |
| 2066 | agcuucuguu agccacugau uaa |
| 2067 | cagcuucugu uagccacuga uuaa |
| 2068 | agcuucuguu agccacugau uaaa |
| 2069 | cagcuucugu uagccacuga uuaaa |
| 2070 | agcuucuguu agccacugau uaaa |
| 2071 | agcuucuguu agccacugau |
| 2072 | gcuucuguua gccacugauu |
| 2073 | agcuucuguu agccacugau u |
| 2074 | gcuucuguua gccacugauu a |
| 2075 | agcuucuguu agccacugau ua |
| 2076 | gcuucuguua gccacugauu aa |
| 2077 | agcuucuguu agccacugau uaa |
| 2078 | gcuucuguua gccacugauu aaa |
| 2079 | agcuucuguu agccacugau uaaa |
| 2080 | gcuucuguua gccacugauu aaa |
| 2081 | ccauuuguau uuagcauguu ccc |
| 2082 | agauaccauu uguauuuagc |
| 2083 | gccauuucuc aacagaucu |
| 2084 | gccauuucuc aacagaucug uca |
| 2085 | auucucagga auuugugucu uuc |
| 2086 | ucucaggaau uugugucuuu c |
| 2087 | guucagcuuc uguuagcc |
| 2088 | cugauuaaau aucuuuauau c |
| 2089 | gccgccauuu cucaacag |
| 2090 | guauuuagca uguuccca |
| 2091 | caggaauuug ugucuuuc |
| 2092 | gcuuuucuuu uaguugcugc ucuuu |
| 2093 | cuuuucuuuu aguugcugcu cuuuu |
| 2094 | uuuucuuuua guugcugcuc uuuuc |
| 2095 | uuucuuuuag uugcugcucu uuucc |
| 2096 | uucuuuuagu ugcugcucuu uucca |
| 2097 | ucuuuuaguu gcugcucuuu uccag |
| 2098 | cuuuuaguug cugcucuuuu ccagg |
| 2099 | uuuuaguugc ugcucuuuuc caggu |
| 2100 | uuuaguugcu gcucuuuucc agguu |
| 2101 | uuaguugcug cucuuuucca gguuc |
| 2102 | uaguugcugc ucuuuuccag guuca |
| 2103 | aguugcugcu cuuuuccagg uucaa |
| 2104 | guugcugcuc uuuuccaggu ucaag |
| 2105 | uugcugcucu uuuccagguu caagu |
| 2106 | ugcugcucuu uuccagguuc aagug |
| 2107 | gcugcucuuu uccagguuca agugg |
| 2108 | cugcucuuuu ccagguucaa guggg |
| 2109 | ugcucuuuuc cagguucaag uggga |
| 2110 | gcucuuuucc agguucaagu gggac |
| 2111 | cucuuuucca gguucaagug ggaua |
| 2112 | ucuuuuccag guucaagugg gauac |
| 2113 | cuuuuccagg uucaaguggg auacu |
| 2114 | uuuuccaggu ucaaguggga uacua |
| 2115 | uuuccagguu caagugggau acuag |
| 2116 | uuccagguuc aagugggaua cuagc |
| 2117 | uccagguuca agugggauac uagca |
| 2118 | ccagguucaa gugggauacu agcaa |
| 2119 | cagguucaag ugggauacua gcaau |
| 2120 | agguucaagu gggauacuag caaug |
| 2121 | gguucaagug ggauacuagc aaugu |
| 2122 | guucaagugg gauacuagca auguu |
| 2123 | uucaaguggg auacuagcaa uguua |
| 2124 | ucaaguggga uacuagcaau guuau |
| 2125 | caagugggau acuagcaaug uuauc |
| 2126 | aagugggaua cuagcaaugu uaucu |
| 2127 | agugggauac uagcaauguu aucug |
| 2128 | gugggauacu agcaauguua ucugc |
| 2129 | ugggauacua gcaauguuau cugcu |
| 2130 | gggauacuag caauguuauc ugcuu |
| 2131 | ggauacuagc aauguuaucu gcuuc |
| 2132 | gauacuagca auguuaucug cuucc |
| 2133 | auacuagcaa uguuaucugc uuccu |
| 2134 | uacuagcaau guuaucugcu uccuc |
| 2135 | acuagcaaug uuaucugcuu ccucc |
| 2136 | cuagcaaugu uaucugcuuc cucca |
| 2137 | uagcaauguu aucugcuucc uccaa |
| 2138 | agcaauguua ucugcuuccu ccaac |
| 2139 | gcaauguuau cugcuuccuc caacc |
| 2140 | caauguuauc ugcuuccucc aacca |
| 2141 | aauguuaucu gcuuccucca accau |
| 2142 | auguuaucug cuuccuccaa ccaua |
| 2143 | uguuaucugc uuccuccaac cauaa |
| 2144 | guuaucugcu uccuccaacc auaaa |
| 2145 | gcugcucuuu uccagguuc |
| 2146 | ucuuuuccag guucaagugg |
| 2147 | agguucaagu gggauacua |
| 2148 | caauuuuucc cacucaguau u |
| 2149 | uugaaguucc uggagucuu |
| 2150 | uccucaggag gcagcucuaa au |
| 2151 | gcgcugguca caaaauccug uugaac |
| 2152 | cacuugcuug aaaaggucua caaagga |
| 2153 | ggugaauaac uuacaaauuu ggaagc |
| 2154 | ccacaggcgu ugcacuuugc aaugc |
| 2155 | cacaggcguu gcacuuugca augcu |
| 2156 | acaggcguug cacuuugcaa ugcug |
| 2157 | caggcguugc acuuugcaau gcugc |
| 2158 | aggcguugca cuuugcaaug cugcu |
| 2159 | ggcguugcac uuugcaaugc ugcug |
| 2160 | gcguugcacu uugcaaugcu gcugu |
| 2161 | cguugcacuu ugcaaugcug cuguc |
| 2162 | cguugcacuu ugcaaugcug cug |
| 2163 | guugcacuuu gcaaugcugc ugucu |
| 2164 | uugcacuuug caaugcugcu gucuu |
| 2165 | ugcacuuugc aaugcugcug ucuuc |
| 2166 | gcacuuugca augcugcugu cuucu |
| 2167 | cacuuugcaa ugcugcuguc uucuu |
| 2168 | acuuugcaau gcugcugucu ucuug |
| 2169 | cuuugcaaug cugcugucuu cuugc |
| 2170 | uuugcaaugc ugcugucuuc uugcu |
| 2171 | uugcaaugcu gcugucuucu ugcua |
| 2172 | ugcaaugcug cugucuucuu gcuau |
| 2173 | gcaaugcugc ugucuucuug cuaug |
| 2174 | caaugcugcu gucuucuugc uauga |
| 2175 | aaugcugcug ucuucuugcu augaa |
| 2176 | augcugcugu cuucuugcua ugaau |
| 2177 | ugcugcuguc uucuugcuau gaaua |
| 2178 | gcugcugucu ucuugcuaug aauaa |
| 2179 | cugcugucuu cuugcuauga auaau |
| 2180 | ugcugucuuc uugcuaugaa uaaug |
| 2181 | gcugucuucu ugcuaugaau aaugu |
| 2182 | cugucuucuu gcuaugaaua auguc |
| 2183 | ugucuucuug cuaugaauaa uguca |
| 2184 | gucuucuugc uaugaauaau gucaa |
| 2185 | ucuucuugcu augaauaaug ucaau |
| 2186 | cuucuugcua ugaauaaugu caauc |
| 2187 | uucuugcuau gaauaauguc aaucc |
| 2188 | ucuugcuaug aauaauguca auccg |
| 2189 | cuugcuauga auaaugucaa uccga |
| 2190 | uugcuaugaa uaaugucaau ccgac |
| 2191 | ugcuaugaau aaugucaauc cgacc |
| 2192 | gcuaugaaua augucaaucc gaccu |
| 2193 | cuaugaauaa ugucaauccg accug |
| 2194 | uaugaauaau gucaauccga ccuga |
| 2195 | augaauaaug ucaauccgac cugag |
| 2196 | ugaauaaugu caauccgacc ugagc |
| 2197 | gaauaauguc aauccgaccu gagcu |
| 2198 | aauaauguca auccgaccug agcuu |
| 2199 | auaaugucaa uccgaccuga gcuuu |
| 2200 | uaaugucaau ccgaccugag cuuug |
| 2201 | aaugucaauc cgaccugagc uuugu |
| 2202 | augucaaucc gaccugagcu uuguu |
| 2203 | ugucaauccg accugagcuu uguug |
| 2204 | gucaauccga ccugagcuuu guugu |
| 2205 | ucaauccgac cugagcuuug uugua |
| 2206 | caauccgacc ugagcuuugu uguag |
| 2207 | aauccgaccu gagcuuuguu guaga |
| 2208 | auccgaccug agcuuuguug uagac |
| 2209 | uccgaccuga gcuuuguugu agacu |
| 2210 | ccgaccugag cuuuguugua gacua |
| 2211 | cgaccugagc uuuguuguag |
| 2212 | cgaccugagc uuuguuguag acuau |
| 2213 | gaccugagcu uuguuguaga cuauc |
| 2214 | accugagcuu uguuguagac uauca |
| 2215 | ccugagcuuu guuguagacu auc |
| 2216 | gcuuuucuuu uaguugcugc ucuuu |
| 2217 | cuuuucuuuu aguugcugcu cuuuu |
| 2218 | uuuucuuuua guugcugcuc uuuuc |
| 2219 | uuucuuuuag uugcugcucu uuucc |
| 2220 | uucuuuuagu ugcugcucuu uucca |
| 2221 | ucuuuuaguu gcugcucuuu uccag |
| 2222 | cuuuuaguug cugcucuuuu ccagg |
| 2223 | uuuuaguugc ugcucuuuuc caggu |
| 2224 | uuuaguugcu gcucuuuucc agguu |
| 2225 | uuaguugcug cucuuuucca gguuc |
| 2226 | uaguugcugc ucuuuuccag guuca |
| 2227 | aguugcugcu cuuuuccagg uucaa |
| 2228 | guugcugcuc uuuuccaggu ucaag |
| 2229 | uugcugcucu uuuccagguu caagu |
| 2230 | ugcugcucuu uuccagguuc aagug |
| 2231 | gcugcucuuu uccagguuca agugg |
| 2232 | cugcucuuuu ccagguucaa guggg |
| 2233 | ugcucuuuuc cagguucaag uggga |
| 2234 | gcucuuuucc agguucaagu gggac |
| 2235 | cucuuuucca gguucaagug ggaua |
| 2236 | ucuuuuccag guucaagugg gauac |
| 2237 | ucuuuuccag guucaagugg |
| 2238 | cuuuuccagg uucaaguggg auacu |
| 2239 | uuuuccaggu ucaaguggga uacua |
| 2240 | uuuccagguu caagugggau acuag |
| 2241 | uuccagguuc aagugggaua cuagc |
| 2242 | uccagguuca agugggauac uagca |
| 2243 | ccagguucaa gugggauacu agcaa |
| 2244 | cagguucaag ugggauacua gcaau |
| 2245 | agguucaagu gggauacuag caaug |
| 2246 | gguucaagug ggauacuagc aaugu |
| 2247 | guucaagugg gauacuagca auguu |
| 2248 | uucaaguggg auacuagcaa uguua |
| 2249 | ucaaguggga uacuagcaau guuau |
| 2250 | caagugggau acuagcaaug uuauc |
| 2251 | aagugggaua cuagcaaugu uaucu |
| 2252 | agugggauac uagcaauguu aucug |
| 2253 | gugggauacu agcaauguua ucugc |
| 2254 | ugggauacua gcaauguuau cugcu |
| 2255 | gggauacuag caauguuauc ugcuu |
| 2256 | ggauacuagc aauguuaucu gcuuc |
| 2257 | gauacuagca auguuaucug cuucc |
| 2258 | auacuagcaa uguuaucugc uuccu |
| 2259 | uacuagcaau guuaucugcu uccuc |
| 2260 | acuagcaaug uuaucugcuu ccucc |
| 2261 | cuagcaaugu uaucugcuuc cucca |
| 2262 | uagcaauguu aucugcuucc uccaa |
| 2263 | agcaauguua ucugcuuccu ccaac |
| 2264 | gcaauguuau cugcuuccuc caacc |
| 2265 | caauguuauc ugcuuccucc aacca |
| 2266 | aauguuaucu gcuuccucca accau |
| 2267 | auguuaucug cuuccuccaa ccaua |
| 2268 | uguuaucugc uuccuccaac cauaa |
| 2269 | ccaauagugg ucaguccagg agcua |
| 2270 | caauaguggu caguccagga gcuag |
| 2271 | aauagugguc aguccaggag cuagg |
| 2272 | auagugguca guccaggagc uaggu |
| 2273 | auagugguca guccaggagc u |
| 2274 | uaguggucag uccaggagcu agguc |
| 2275 | aguggucagu ccaggagcua gguca |
| 2276 | guggucaguc caggagcuag gucag |
| 2277 | uggucagucc aggagcuagg ucagg |
| 2278 | ggucagucca ggagcuaggu caggc |
| 2279 | gucaguccag gagcuagguc aggcu |
| 2280 | ucaguccagg agcuagguca ggcug |
| 2281 | caguccagga gcuaggucag gcugc |
| 2282 | aguccaggag cuaggucagg cugcu |
| 2283 | guccaggagc uaggucaggc ugcuu |
| 2284 | uccaggagcu aggucaggcu gcuuu |
| 2285 | ccaggagcua ggucaggcug cuuug |
| 2286 | caggagcuag gucaggcugc uuugc |
| 2287 | aggagcuagg ucaggcugcu uugcc |
| 2288 | ggagcuaggu caggcugcuu ugccc |
| 2289 | gagcuagguc aggcugcuuu gcccu |
| 2290 | agcuagguca ggcugcuuug cccuc |
| 2291 | gcuaggucag gcugcuuugc ccuca |
| 2292 | cuaggucagg cugcuuugcc cucag |
| 2293 | uaggucaggc ugcuuugccc ucagc |
| 2294 | aggucaggcu gcuuugcccu cagcu |
| 2295 | ggucaggcug cuuugcccuc agcuc |
| 2296 | gucaggcugc uuugcccuca gcucu |
| 2297 | ucaggcugcu uugcccucag cucuu |
| 2298 | caggcugcuu ugcccucagc ucuug |
| 2299 | aggcugcuuu gcccucagcu cuuga |
| 2300 | ggcugcuuug cccucagcuc uugaa |
| 2301 | gcugcuuugc ccucagcucu ugaag |
| 2302 | cugcuuugcc cucagcucuu gaagu |
| 2303 | ugcuuugccc ucagcucuug aagua |
| 2304 | gcuuugcccu cagcucuuga aguaa |
| 2305 | cuuugcccuc agcucuugaa guaaa |
| 2306 | uuugcccuca gcucuugaag uaaac |
| 2307 | uugcccucag cucuugaagu aaacg |
| 2308 | ugcccucagc ucuugaagua aacgg |
| 2309 | gcccucagcu cuugaaguaa acggu |
| 2310 | cccucagcuc uugaaguaaa cgguu |
| 2311 | ccucagcucu ugaaguaaac |
| 2312 | ccucagcucu ugaaguaaac g |
| 2313 | cucagcucuu gaaguaaacg |
| 2314 | guaccuccaa caucaaggaa gaugg |
| 2315 | uaccuccaac aucaaggaag auggc |
| 2316 | accuccaaca ucaaggaaga uggca |
| 2317 | ccuccaacau caaggaagau ggcau |
| 2318 | cuccaacauc aaggaagaug gcauu |
| 2319 | uccaacauca aggaagaugg cauuu |
| 2320 | ccaacaucaa ggaagauggc auuuc |
| 2321 | caacaucaag gaagauggca uuucu |
| 2322 | aacaucaagg aagauggcau uucua |
| 2323 | acaucaagga agauggcauu ucuag |
| 2324 | caucaaggaa gauggcauuu cuagu |
| 2325 | aucaaggaag auggcauuuc uaguu |
| 2326 | ucaaggaaga uggcauuucu aguuu |
| 2327 | caaggaagau ggcauuucua guuug |
| 2328 | aaggaagaug gcauuucuag uuugg |
| 2329 | aggaagaugg cauuucuagu uugga |
| 2330 | ggaagauggc auuucuaguu uggag |
| 2331 | gaagauggca uuucuaguuu ggaga |
| 2332 | aagauggcau uucuaguuug gagau |
| 2333 | agauggcauu ucuaguuugg agaug |
| 2334 | gauggcauuu cuaguuugga gaugg |
| 2335 | auggcauuuc uaguuuggag auggc |
| 2336 | uggcauuucu aguuuggaga uggca |
| 2337 | ggcauuucua guuuggagau ggcag |
| 2338 | gcauuucuag uuuggagaug gcagu |
| 2339 | cauuucuagu uuggagaugg caguu |
| 2340 | auuucuaguu uggagauggc aguuu |
| 2341 | uuucuaguuu ggagauggca guuuc |
| 2342 | uucuaguuug gagauggcag uuucc |
| 2343 | ucuaguuugg agauggcagu uuccu |
| 2344 | cuaguuugga gauggcaguu uccuu |
| 2345 | uaguuuggag auggcaguuu ccuua |
| 2346 | aguuuggaga uggcaguuuc cuuag |
| 2347 | guuuggagau ggcaguuucc uuagu |
| 2348 | uuuggagaug gcaguuuccu uagua |
| 2349 | uuggagaugg caguuuccuu aguaa |
| 2350 | uggagauggc aguuuccuua guaac |
| 2351 | gagauggcag uuuccuuagu aacca |
| 2352 | agauggcagu uuccuuagua accac |
| 2353 | gauggcaguu uccuuaguaa ccaca |
| 2354 | auggcaguuu ccuuaguaac cacag |
| 2355 | uggcaguuuc cuuaguaacc acagg |
| 2356 | ggcaguuucc uuaguaacca caggu |
| 2357 | gcaguuuccu uaguaaccac agguu |
| 2358 | caguuuccuu aguaaccaca gguug |
| 2359 | aguuuccuua guaaccacag guugu |
| 2360 | guuuccuuag uaaccacagg uugug |
| 2361 | uuuccuuagu aaccacaggu ugugu |
| 2362 | uuccuuagua accacagguu guguc |
| 2363 | uccuuaguaa ccacagguug uguca |
| 2364 | ccuuaguaac cacagguugu gucac |
| 2365 | cuuaguaacc acagguugug ucacc |
| 2366 | uuaguaacca cagguugugu cacca |
| 2367 | uaguaaccac agguuguguc accag |
| 2368 | aguaaccaca gguuguguca ccaga |
| 2369 | guaaccacag guugugucac cagag |
| 2370 | uaaccacagg uugugucacc agagu |
| 2371 | aaccacaggu ugugucacca gagua |
| 2372 | accacagguu gugucaccag aguaa |
| 2373 | ccacagguug ugucaccaga guaac |
| 2374 | cacagguugu gucaccagag uaaca |
| 2375 | acagguugug ucaccagagu aacag |
| 2376 | cagguugugu caccagagua acagu |
| 2377 | agguuguguc accagaguaa caguc |
| 2378 | gguuguguca ccagaguaac agucu |
| 2379 | guugugucac cagaguaaca gucug |
| 2380 | uugugucacc agaguaacag ucuga |
| 2381 | ugugucacca gaguaacagu cugag |
| 2382 | gugucaccag aguaacaguc ugagu |
| 2383 | ugucaccaga guaacagucu gagua |
| 2384 | gucaccagag uaacagucug aguag |
| 2385 | ucaccagagu aacagucuga guagg |
| 2386 | caccagagua acagucugag uagga |
| 2387 | accagaguaa cagucugagu aggag |
| 2388 | agccucuuga uugcuggucu uguuu |
| 2389 | gccucuugau ugcuggucuu guuuu |
| 2390 | ccucuugauu gcuggucuug uuuuu |
| 2391 | ccucuugauu gcuggucuug |
| 2392 | cucuugauug cuggucuugu uuuuc |
| 2393 | ucuugauugc uggucuuguu uuuca |
| 2394 | cuugauugcu ggucuuguuu uucaa |
| 2395 | uugauugcug gucuuguuuu ucaaa |
| 2396 | ugauugcugg ucuuguuuuu caaau |
| 2397 | gauugcuggu cuuguuuuuc aaauu |
| 2398 | gauugcuggu cuuguuuuuc |
| 2399 | auugcugguc uuguuuuuca aauuu |
| 2400 | uugcuggucu uguuuuucaa auuuu |
| 2401 | ugcuggucuu guuuuucaaa uuuug |
| 2402 | gcuggucuug uuuuucaaau uuugg |
| 2403 | cuggucuugu uuuucaaauu uuggg |
| 2404 | uggucuuguu uuucaaauuu ugggc |
| 2405 | ggucuuguuu uucaaauuuu gggca |
| 2406 | gucuuguuuu ucaaauuuug ggcag |
| 2407 | ucuuguuuuu caaauuuugg gcagc |
| 2408 | cuuguuuuuc aaauuuuggg cagcg |
| 2409 | uuguuuuuca aauuuugggc agcgg |
| 2410 | uguuuuucaa auuuugggca gcggu |
| 2411 | guuuuucaaa uuuugggcag cggua |
| 2412 | uuuuucaaau uuugggcagc gguaa |
| 2413 | uuuucaaauu uugggcagcg guaau |
| 2414 | uuucaaauuu ugggcagcgg uaaug |
| 2415 | uucaaauuuu gggcagcggu aauga |
| 2416 | ucaaauuuug ggcagcggua augag |
| 2417 | caaauuuugg gcagcgguaa ugagu |
| 2418 | aaauuuuggg cagcgguaau gaguu |
| 2419 | aauuuugggc agcgguaaug aguuc |
| 2420 | auuuugggca gcgguaauga guucu |
| 2421 | uuuugggcag cgguaaugag uucuu |
| 2422 | uuugggcagc gguaaugagu ucuuc |
| 2423 | uugggcagcg guaaugaguu cuucc |
| 2424 | ugggcagcgg uaaugaguuc uucca |
| 2425 | gggcagcggu aaugaguucu uccaa |
| 2426 | ggcagcggua augaguucuu ccaac |
| 2427 | gcagcgguaa ugaguucuuc caacu |
| 2428 | cagcgguaau gaguucuucc aacug |
| 2429 | agcgguaaug aguucuucca acugg |
| 2430 | gcgguaauga guucuuccaa cuggg |
| 2431 | cgguaaugag uucuuccaac ugggg |
| 2432 | gguaaugagu ucuuccaacu gggga |
| 2433 | gguaaugagu ucuuccaacu gg |
| 2434 | guaaugaguu cuuccaacug gggac |
| 2435 | uaaugaguuc uuccaacugg ggacg |
| 2436 | aaugaguucu uccaacuggg gacgc |
| 2437 | augaguucuu ccaacugggg acgcc |
| 2438 | ugaguucuuc caacugggga cgccu |
| 2439 | gaguucuucc aacuggggac gccuc |
| 2440 | aguucuucca acuggggacg ccucu |
| 2441 | guucuuccaa cuggggacgc cucug |
| 2442 | uucuuccaac uggggacgcc ucugu |
| 2443 | ucuuccaacu ggggacgccu cuguu |
| 2444 | cuuccaacug gggacgccuc uguuc |
| 2445 | uuccaacugg ggacgccucu guucc |
| 2446 | uccaacuggg gacgccucug uucca |
| 2447 | ccaacugggg acgccucugu uccaa |
| 2448 | caacugggga cgccucuguu ccaaa |
| 2449 | aacuggggac gccucuguuc caaau |
| 2450 | acuggggacg ccucuguucc aaauc |
| 2451 | cuggggacgc cucuguucca aaucc |
| 2452 | uggggacgcc ucuguuccaa auccu |
| 2453 | ggggacgccu cuguuccaaa uccug |
| 2454 | gggacgccuc uguuccaaau ccugc |
| 2455 | ggacgccucu guuccaaauc cugca |
| 2456 | gacgccucug uuccaaaucc ugcau |
| 2457 | cucuggccug uccuaagacc ugcuc |
| 2458 | ucuggccugu ccuaagaccu gcuca |
| 2459 | uggccugucc uaagaccugc ucagc |
| 2460 | ggccuguccu aagaccugcu cagcu |
| 2461 | gccuguccua agaccugcuc agcuu |
| 2462 | ccuguccuaa gaccugcuca gcuuc |
| 2463 | cuguccuaag accugcucag cuucu |
| 2464 | uguccuaaga ccugcucagc uucuu |
| 2465 | guccuaagac cugcucagcu ucuuc |
| 2466 | uccuaagacc ugcucagcuu cuucc |
| 2467 | ccuaagaccu gcucagcuuc uuccu |
| 2468 | cuaagaccug cucagcuucu uccuu |
| 2469 | uaagaccugc ucagcuucuu ccuua |
| 2470 | aagaccugcu cagcuucuuc cuuag |
| 2471 | agaccugcuc agcuucuucc uuagc |
| 2472 | gaccugcuca gcuucuuccu uagcu |
| 2473 | accugcucag cuucuuccuu agcuu |
| 2474 | ccugcucagc uucuuccuua gcuuc |
| 2475 | cugcucagcu ucuuccuuag cuucc |
| 2476 | ugcucagcuu cuuccuuagc uucca |
| 2477 | gcucagcuuc uuccuuagcu uccag |
| 2478 | cucagcuucu uccuuagcuu ccagc |
| 2479 | ucagcuucuu ccuuagcuuc cagcc |
| 2480 | cagcuucuuc cuuagcuucc agcca |
| 2481 | agcuucuucc uuagcuucca gccau |
| 2482 | gcuucuuccu uagcuuccag ccauu |
| 2483 | cuucuuccuu agcuuccagc cauug |
| 2484 | uucuuccuua gcuuccagcc auugu |
| 2485 | ucuuccuuag cuuccagcca uugug |
| 2486 | cuuccuuagc uuccagccau ugugu |
| 2487 | uuccuuagcu uccagccauu guguu |
| 2488 | uccuuagcuu ccagccauug uguug |
| 2489 | ccuuagcuuc cagccauugu guuga |
| 2490 | cuuagcuucc agccauugug uugaa |
| 2491 | uuagcuucca gccauugugu ugaau |
| 2492 | uagcuuccag ccauuguguu gaauc |
| 2493 | agcuuccagc cauuguguug aaucc |
| 2494 | gcuuccagcc auuguguuga auccu |
| 2495 | cuuccagcca uuguguugaa uccuu |
| 2496 | uuccagccau uguguugaau ccuuu |
| 2497 | uccagccauu guguugaauc cuuua |
| 2498 | ccagccauug uguugaaucc uuuaa |
| 2499 | cagccauugu guugaauccu uuaac |
| 2500 | agccauugug uugaauccuu uaaca |
| 2501 | gccauugugu ugaauccuuu aacau |
| 2502 | ccauuguguu gaauccuuua acauu |
| 2503 | cauuguguug aauccuuuaa cauuu |
| 2504 | cauuuuugac cuacaugugg |
| 2505 | uuugaccuac auguggaaag |
| 2506 | uacauuuuug accuacaugu ggaaag |
| 2507 | ggucuccuua ccuauga |
| 2508 | ucuuaccuau gacuauggau gaga |
| 2509 | auuuuugacc uacaugggaa ag |
| 2510 | uacgaguuga uugucggacc cag |
| 2511 | guggucuccu uaccuaugac ugugg |
| 2512 | ugucucagua aucuucuuac cuau |
| 2513 | ugcauguucc agucguugug ugg |
| 2514 | cacuauucca gucaaauagg ucugg |
| 2515 | auuuaccaac cuucaggauc gagua |
| 2516 | ggccuaaaac acauacacau a |
| 2517 | cccugaggca uucccaucuu gaau |
| 2518 | aggacuuacu ugcuuuguuu |
| 2519 | cuugaauuua ggagauucau cug |
| 2520 | caucuucuga uaauuuuccu guu |
| 2521 | ccauuacagu ugucuguguu |
| 2522 | ugacagccug ugaaaucugu gag |
| 2523 | uaaucugccu cuucuuuugg |
| 2524 | cagcaguagu ugucaucugc |
| 2525 | gccugagcug aucugcuggc aucuugc |
| 2526 | gccugagcug aucugcuggc aucuugcagu u |
| 2527 | ucugcuggca ucuugc |
| 2528 | gccgguugac uucauccugu gc |
| 2529 | gucugcaucc aggaacaugg guc |
| 2530 | uacuuacugu cuguagcucu uucu |
| 2531 | cugcauccag gaacaugggu cc |
| 2532 | guugaagauc ugauagccgg uuga |
| 2533 | ucagcuucug uuagccacug |
| 2534 | uucagcuucu guuagccacu |
| 2535 | uucagcuucu guuagccacu g |
| 2536 | ucagcuucug uuagccacug a |
| 2537 | uucagcuucu guuagccacu ga |
| 2538 | ucagcuucug uuagccacug a |
| 2539 | uucagcuucu guuagccacu ga |
| 2540 | ucagcuucug uuagccacug au |
| 2541 | uucagcuucu guuagccacu gau |
| 2542 | ucagcuucug uuagccacug auu |
| 2543 | uucagcuucu guuagccacu gauu |
| 2544 | ucagcuucug uuagccacug auua |
| 2545 | uucagcuucu guuagccacu gaua |
| 2546 | ucagcuucug uuagccacug auuaa |
| 2547 | uucagcuucu guuagccacu gauuaa |
| 2548 | ucagcuucug uuagccacug auuaaa |
| 2549 | uucagcuucu guuagccacu gauuaaa |
| 2550 | cagcuucugu uagccacug |
| 2551 | cagcuucugu uagccacuga u |
| 2552 | agcuucuguu agccacugau u |
| 2553 | cagcuucugu uagccacuga uu |
| 2554 | agcuucuguu agccacugau ua |
| 2555 | cagcuucugu uagccacuga uua |
| 2556 | agcuucuguu agccacugau uaa |
| 2557 | cagcuucugu uagccacuga uuaa |
| 2558 | agcuucuguu agccacugau uaaa |
| 2559 | cagcuucugu uagccacuga uuaaa |
| 2560 | agcuucuguu agccacugau uaaa |
| 2561 | agcuucuguu agccacugau |
| 2562 | gcuucuguua gccacugauu |
| 2563 | agcuucuguu agccacugau u |
| 2564 | gcuucuguua gccacugauu a |
| 2565 | agcuucuguu agccacugau ua |
| 2566 | gcuucuguua gccacugauu aa |
| 2567 | agcuucuguu agccacugau uaa |
| 2568 | gcuucuguua gccacugauu aaa |
| 2569 | agcuucuguu agccacugau uaaa |
| 2570 | gcuucuguua gccacugauu aaa |
| 2571 | ccauuuguau uuagcauguu ccc |
| 2572 | agauaccauu uguauuuagc |
| 2573 | gccauuucuc aacagaucu |
| 2574 | gccauuucuc aacagaucug uca |
| 2575 | auucucagga auuugugucu uuc |
| 2576 | ucucaggaau uugugucuuu c |
| 2577 | guucagcuuc uguuagcc |
| 2578 | cugauuaaau aucuuuauau c |
| 2579 | gccgccauuu cucaacag |
| 2580 | gccgccauuu cucaacag |
| 2581 | caggaauuug ugucuuuc |
| 2582 | uuugccgcug cccaaugcca uccug |
| 2583 | auucaauguu cugacaacag uuugc |
| 2584 | ccaguugcau ucaauguucu gacaa |
| 2585 | caguugcauu caauguucug ac |
| 2586 | aguugcauuc aauguucuga |
| 2587 | gauugcugaa uuauuucuuc c |
| 2588 | gauugcugaa uuauuucuuc cccag |
| 2589 | auugcugaau uauuucuucc ccagu |
| 2590 | uugcugaauu auuucuuccc caguu |
| 2591 | ugcugaauua uuucuucccc aguug |
| 2592 | gcugaauuau uucuucccca guugc |
| 2593 | cugaauuauu ucuuccccag uugca |
| 2594 | ugaauuauuu cuuccccagu ugcau |
| 2595 | gaauuauuuc uuccccaguu gcauu |
| 2596 | aauuauuucu uccccaguug cauuc |
| 2597 | auuauuucuu ccccaguugc auuca |
| 2598 | uuauuucuuc cccaguugca uucaa |
| 2599 | uauuucuucc ccaguugcau ucaau |
| 2600 | auuucuuccc caguugcauu caaug |
| 2601 | uuucuucccc aguugcauuc aaugu |
| 2602 | uucuucccca guugcauuca auguu |
| 2603 | ucuuccccag uugcauucaa uguuc |
| 2604 | cuuccccagu ugcauucaau guucu |
| 2605 | uuccccaguu gcauucaaug uucug |
| 2606 | uccccaguug cauucaaugu ucuga |
| 2607 | ccccaguugc auucaauguu cugac |
| 2608 | cccaguugca uucaauguuc ugaca |
| 2609 | ccaguugcau ucaauguucu gacaa |
| 2610 | caguugcauu caauguucug acaac |
| 2611 | aguugcauuc aauguucuga caaca |
| 2612 | uccuguagaa uacuggcauc |
| 2613 | ugcagaccuc cugccaccgc agauuca |
| 2614 | uugcagaccu ccugccaccg cagauucagg cuuc |
| 2615 | guugcauuca auguucugac aacag |
| 2616 | uugcauucaa uguucugaca acagu |
| 2617 | ugcauucaau guucugacaa caguu |
| 2618 | gcauucaaug uucugacaac aguuu |
| 2619 | cauucaaugu ucugacaaca guuug |
| 2620 | auucaauguu cugacaacag uuugc |
| 2621 | ucaauguucu gacaacaguu ugccg |
| 2622 | caauguucug acaacaguuu gccgc |
| 2623 | aauguucuga caacaguuug ccgcu |
| 2624 | auguucugac aacaguuugc cgcug |
| 2625 | uguucugaca acaguuugcc gcugc |
| 2626 | guucugacaa caguuugccg cugcc |
| 2627 | uucugacaac aguuugccgc ugccc |
| 2628 | ucugacaaca guuugccgcu gccca |
| 2629 | cugacaacag uuugccgcug cccaa |
| 2630 | ugacaacagu uugccgcugc ccaau |
| 2631 | gacaacaguu ugccgcugcc caaug |
| 2632 | acaacaguuu gccgcugccc aaugc |
| 2633 | caacaguuug ccgcugccca augcc |
| 2634 | aacaguuugc cgcugcccaa ugcca |
| 2635 | acaguuugcc gcugcccaau gccau |
| 2636 | caguuugccg cugcccaaug ccauc |
| 2637 | aguuugccgc ugcccaaugc caucc |
| 2638 | guuugccgcu gcccaaugcc auccu |
| 2639 | uuugccgcug cccaaugcca uccug |
| 2640 | uugccgcugc ccaaugccau ccugg |
| 2641 | ugccgcugcc caaugccauc cugga |
| 2642 | gccgcugccc aaugccaucc uggag |
| 2643 | ccgcugccca augccauccu ggagu |
| 2644 | cgcugcccaa ugccauccug gaguu |
| 2645 | uguuuuugag gauugcugaa |
| 2646 | uguucugaca acaguuugcc gcugcccaau gccauccugg |
| 2647 | cuguugcagu aaucuaugag |
| 2648 | ugcaguaauc uaugaguuuc |
| 2649 | gagucuucua ggagccuu |
| 2650 | ugccauuguu ucaucagcuc uuu |
| 2651 | uccuguagga cauuggcagu |
| 2652 | cuuggagucu ucuaggagcc |
| 2653 | uaggugccug ccggcuu |
| 2654 | uucagcugua gccacacc |
| 2655 | cugaacugcu ggaaagucgc c |
| 2656 | cuggcuucca aaugggaccu gaaaaagaac |
| 2657 | caauuuuucc cacucaguau u |
| 2658 | uugaaguucc uggagucuu |
| 2659 | uccucaggag gcagcucuaa au |
| 2660 | uggcucucuc ccaggg |
| 2661 | gagauggcuc ucucccaggg acccugg |
| 2662 | gggcacuuug uuuggcg |
| 2663 | ggucccagca aguuguuug |
| 2664 | ugggaugguc ccagcaaguu guuug |
| 2665 | guagagcucu gucauuuugg g |
| 2666 | gcucaagaga uccacugcaa aaaac |
| 2667 | gccauacgua cguaucauaa acauuc |
| 2668 | ucugcaggau auccaugggc ugguc |
| 2669 | gauccucccu guucgucccc uauuaug |
| 2670 | ugcuuuagac uccuguaccu gaua |
| 2671 | ggcggccuuu guguugac |
| 2672 | ggacaggccu uuauguucgu gcugc |
| 2673 | ccuuuauguu cgugcugcu |
| 2674 | ccucagcucu ugaaguaaac gguuu |
| 2675 | cucagcucuu gaaguaaacg guuua |
| 2676 | ucagcucuug aaguaaacgg uuuac |
| 2677 | cagcucuuga aguaaacggu uuacc |
| 2678 | agcucuugaa guaaacgguu uaccg |
| 2679 | gcucuugaag uaaacgguuu accgc |
| 2680 | cucuugaagu aaacgguuua ccgcc |
| 2681 | guaccuccaa caucaaggaa gaugg |
| 2682 | uaccuccaac aucaaggaag auggc |
| 2683 | accuccaaca ucaaggaaga uggca |
| 2684 | ccuccaacau caaggaagau ggcau |
| 2685 | cuccaacauc aaggaagaug gcauu |
| 2686 | uccaacauca aggaagaugg cauuu |
| 2687 | ccaacaucaa ggaagauggc auuuc |
| 2688 | caacaucaag gaagauggca uuucu |
| 2689 | aacaucaagg aagauggcau uucua |
| 2690 | acaucaagga agauggcauu ucuag |
| 2691 | caucaaggaa gauggcauuu cuagu |
| 2692 | aucaaggaag auggcauuuc uaguu |
| 2693 | ucaaggaaga uggcauuucu aguuu |
| 2694 | caaggaagau ggcauuucua guuug |
| 2695 | aaggaagaug gcauuucuag uuugg |
| 2696 | aggaagaugg cauuucuagu uugga |
| 2697 | ggaagauggc auuucuaguu uggag |
| 2698 | gaagauggca uuucuaguuu ggaga |
| 2699 | aagauggcau uucuaguuug gagau |
| 2700 | agauggcauu ucuaguuugg agaug |
| 2701 | gauggcauuu cuaguuugga gaugg |
| 2702 | auggcauuuc uaguuuggag auggc |
| 2703 | uggcauuucu aguuuggaga uggca |
| 2704 | ggcauuucua guuuggagau ggcag |
| 2705 | gcauuucuag uuuggagaug gcagu |
| 2706 | cauuucuagu uuggagaugg caguu |
| 2707 | auuucuaguu uggagauggc aguuu |
| 2708 | uuucuaguuu ggagauggca guuuc |
| 2709 | uucuaguuug gagauggcag uuucc |
| 2710 | ucuaguuugg agauggcagu uuccu |
| 2711 | cuaguuugga gauggcaguu uccuu |
| 2712 | uaguuuggag auggcaguuu ccuua |
| 2713 | aguuuggaga uggcaguuuc cuuag |
| 2714 | guuuggagau ggcaguuucc uuagu |
| 2715 | uuuggagaug gcaguuuccu uagua |
| 2716 | uuggagaugg caguuuccuu aguaa |
| 2717 | uggagauggc aguuuccuua guaac |
| 2718 | gagauggcag uuuccuuagu aacca |
| 2719 | agauggcagu uuccuuagua accac |
| 2720 | gauggcaguu uccuuaguaa ccaca |
| 2721 | auggcaguuu ccuuaguaac cacag |
| 2722 | uggcaguuuc cuuaguaacc acagg |
| 2723 | ggcaguuucc uuaguaacca caggu |
| 2724 | gcaguuuccu uaguaaccac agguu |
| 2725 | caguuuccuu aguaaccaca gguug |
| 2726 | aguuuccuua guaaccacag guugu |
| 2727 | guuuccuuag uaaccacagg uugug |
| 2728 | uuuccuuagu aaccacaggu ugugu |
| 2729 | uuccuuagua accacagguu guguc |
| 2730 | uccuuaguaa ccacagguug uguca |
| 2731 | ccuuaguaac cacagguugu gucac |
| 2732 | cuuaguaacc acagguugug ucacc |
| 2733 | uuaguaacca cagguugugu cacca |
| 2734 | uaguaaccac agguuguguc accag |
| 2735 | aguaaccaca gguuguguca ccaga |
| 2736 | guaaccacag guugugucac cagag |
| 2737 | uaaccacagg uugugucacc agagu |
| 2738 | aaccacaggu ugugucacca gagua |
| 2739 | accacagguu gugucaccag aguaa |
| 2740 | ccacagguug ugucaccaga guaac |
| 2741 | cacagguugu gucaccagag uaaca |
| 2742 | acagguugug ucaccagagu aacag |
| 2743 | cagguugugu caccagagua acagu |
| 2744 | agguuguguc accagaguaa caguc |
| 2745 | gguuguguca ccagaguaac agucu |
| 2746 | guugugucac cagaguaaca gucug |
| 2747 | uugugucacc agaguaacag ucuga |
| 2748 | ugugucacca gaguaacagu cugag |
| 2749 | gugucaccag aguaacaguc ugagu |
| 2750 | ugucaccaga guaacagucu gagua |
| 2751 | gucaccagag uaacagucug aguag |
| 2752 | ucaccagagu aacagucuga guagg |
| 2753 | caccagagua acagucugag uagga |
| 2754 | accagaguaa cagucugagu aggag |
| 2755 | uuugccgcug cccaaugcca uccug |
| 2756 | auucaauguu cugacaacag uuugc |
| 2757 | ccaguugcau ucaauguucu gacaa |
| 2758 | caguugcauu caauguucug ac |
| 2759 | aguugcauuc aauguucuga |
| 2760 | gauugcugaa uuauuucuuc c |
| 2761 | gauugcugaa uuauuucuuc cccag |
| 2762 | auugcugaau uauuucuucc ccagu |
| 2763 | uugcugaauu auuucuuccc caguu |
| 2764 | ugcugaauua uuucuucccc aguug |
| 2765 | gcugaauuau uucuucccca guugc |
| 2766 | cugaauuauu ucuuccccag uugca |
| 2767 | ugaauuauuu cuuccccagu ugcau |
| 2768 | gaauuauuuc uuccccaguu gcauu |
| 2769 | aauuauuucu uccccaguug cauuc |
| 2770 | auuauuucuu ccccaguugc auuca |
| 2771 | uuauuucuuc cccaguugca uucaa |
| 2772 | uauuucuucc ccaguugcau ucaau |
| 2773 | auuucuuccc caguugcauu caaug |
| 2774 | uuucuucccc aguugcauuc aaugu |
| 2775 | uucuucccca guugcauuca auguu |
| 2776 | ucuuccccag uugcauucaa uguuc |
| 2777 | cuuccccagu ugcauucaau guucu |
| 2778 | uuccccaguu gcauucaaug uucug |
| 2779 | uccccaguug cauucaaugu ucuga |
| 2780 | ccccaguugc auucaauguu cugac |
| 2781 | cccaguugca uucaauguuc ugaca |
| 2782 | ccaguugcau ucaauguucu gacaa |
| 2783 | caguugcauu caauguucug acaac |
| 2784 | aguugcauuc aauguucuga caaca |
| 2785 | uccuguagaa uacuggcauc |
| 2786 | ugcagaccuc cugccaccgc agauuca |
| 2787 | uugcagaccu ccugccaccg cagauucagg cuuc |
| 2788 | guugcauuca auguucugac aacag |
| 2789 | uugcauucaa uguucugaca acagu |
| 2790 | ugcauucaau guucugacaa caguu |
| 2791 | gcauucaaug uucugacaac aguuu |
| 2792 | cauucaaugu ucugacaaca guuug |
| 2793 | auucaauguu cugacaacag uuugc |
| 2794 | ucaauguucu gacaacaguu ugccg |
| 2795 | caauguucug acaacaguuu gccgc |
| 2796 | aauguucuga caacaguuug ccgcu |
| 2797 | auguucugac aacaguuugc cgcug |
| 2798 | uguucugaca acaguuugcc gcugc |
| 2799 | guucugacaa caguuugccg cugcc |
| 2800 | uucugacaac aguuugccgc ugccc |
| 2801 | ucugacaaca guuugccgcu gccca |
| 2802 | cugacaacag uuugccgcug cccaa |
| 2803 | ugacaacagu uugccgcugc ccaau |
| 2804 | gacaacaguu ugccgcugcc caaug |
| 2805 | acaacaguuu gccgcugccc aaugc |
| 2806 | caacaguuug ccgcugccca augcc |
| 2807 | aacaguuugc cgcugcccaa ugcca |
| 2808 | acaguuugcc gcugcccaau gccau |
| 2809 | caguuugccg cugcccaaug ccauc |
| 2810 | aguuugccgc ugcccaaugc caucc |
| 2811 | guuugccgcu gcccaaugcc auccu |
| 2812 | uuugccgcug cccaaugcca uccug |
| 2813 | uugccgcugc ccaaugccau ccugg |
| 2814 | ugccgcugcc caaugccauc cugga |
| 2815 | gccgcugccc aaugccaucc uggag |
| 2816 | ccgcugccca augccauccu ggagu |
| 2817 | cgcugcccaa ugccauccug gaguu |
| 2818 | uguuuuugag gauugcugaa |
| 2819 | uguucugaca acaguuugcc gcugcccaau gccauccugg |
| 2820 | cucuggccug uccuaagacc ugcuc |
| 2821 | ucuggccugu ccuaagaccu gcuca |
| 2822 | cuggccuguc cuaagaccug cucag |
| 2823 | uggccugucc uaagaccugc ucagc |
| 2824 | ggccuguccu aagaccugcu cagcu |
| 2825 | gccuguccua agaccugcuc agcuu |
| 2826 | ccuguccuaa gaccugcuca gcuuc |
| 2827 | cuguccuaag accugcucag cuucu |
| 2828 | uguccuaaga ccugcucagc uucuu |
| 2829 | guccuaagac cugcucagcu ucuuc |
| 2830 | uccuaagacc ugcucagcuu cuucc |
| 2831 | ccuaagaccu gcucagcuuc uuccu |
| 2832 | cuaagaccug cucagcuucu uccuu |
| 2833 | uaagaccugc ucagcuucuu ccuua |
| 2834 | aagaccugcu cagcuucuuc cuuag |
| 2835 | agaccugcuc agcuucuucc uuagc |
| 2836 | gaccugcuca gcuucuuccu uagcu |
| 2837 | accugcucag cuucuuccuu agcuu |
| 2838 | ccugcucagc uucuuccuua gcuuc |
| 2839 | cugcucagcu ucuuccuuag cuucc |
| 2840 | ugcucagcuu cuuccuuagc uucca |
| 2841 | gcucagcuuc uuccuuagcu uccag |
| 2842 | cucagcuucu uccuuagcuu ccagc |
| 2843 | ucagcuucuu ccuuagcuuc cagcc |
| 2844 | cagcuucuuc cuuagcuucc agcca |
| 2845 | agcuucuucc uuagcuucca gccau |
| 2846 | gcuucuuccu uagcuuccag ccauu |
| 2847 | cuucuuccuu agcuuccagc cauug |
| 2848 | uucuuccuua gcuuccagcc auugu |
| 2849 | ucuuccuuag cuuccagcca uugug |
| 2850 | cuuccuuagc uuccagccau ugugu |
| 2851 | uuccuuagcu uccagccauu guguu |
| 2852 | uccuuagcuu ccagccauug uguug |
| 2853 | ccuuagcuuc cagccauugu guuga |
| 2854 | cuuagcuucc agccauugug uugaa |
| 2855 | uuagcuucca gccauugugu ugaau |
| 2856 | uagcuuccag ccauuguguu gaauc |
| 2857 | agcuuccagc cauuguguug aaucc |
| 2858 | gcuuccagcc auuguguuga auccu |
| 2859 | cuuccagcca uuguguugaa uccuu |
| 2860 | uuccagccau uguguugaau ccuuu |
| 2861 | uccagccauu guguugaauc cuuua |
| 2862 | ccagccauug uguugaaucc uuuaa |
| 2863 | cagccauugu guugaauccu uuaac |
| 2864 | agccauugug uugaauccuu uaaca |
| 2865 | gccauugugu ugaauccuuu aacau |
| 2866 | ccauuguguu gaauccuuua acauu |
| 2867 | cauuguguug aauccuuuaa cauuu |
| 2868 | ucagcuucug uuagccacug |
| 2869 | uucagcuucu guuagccacu |
| 2870 | uucagcuucu guuagccacu g |
| 2871 | ucagcuucug uuagccacug a |
| 2872 | uucagcuucu guuagccacu ga |
| 2873 | ucagcuucug uuagccacug a |
| 2874 | uucagcuucu guuagccacu ga |
| 2875 | ucagcuucug uuagccacug au |
| 2876 | uucagcuucu guuagccacu gau |
| 2877 | ucagcuucug uuagccacug auu |
| 2878 | uucagcuucu guuagccacu gauu |
| 2879 | ucagcuucug uuagccacug auua |
| 2880 | uucagcuucu guuagccacu gaua |
| 2881 | ucagcuucug uuagccacug auuaa |
| 2882 | uucagcuucu guuagccacu gauuaa |
| 2883 | ucagcuucug uuagccacug auuaaa |
| 2884 | uucagcuucu guuagccacu gauuaaa |
| 2885 | cagcuucugu uagccacug |
| 2886 | cagcuucugu uagccacuga u |
| 2887 | agcuucuguu agccacugau u |
| 2888 | cagcuucugu uagccacuga uu |
| 2889 | agcuucuguu agccacugau ua |
| 2890 | cagcuucugu uagccacuga uua |
| 2891 | agcuucuguu agccacugau uaa |
| 2892 | cagcuucugu uagccacuga uuaa |
| 2893 | agcuucuguu agccacugau uaaa |
| 2894 | cagcuucugu uagccacuga uuaaa |
| 2895 | agcuucuguu agccacugau uaaa |
| 2896 | agcuucuguu agccacugau |
| 2897 | gcuucuguua gccacugauu |
| 2898 | agcuucuguu agccacugau u |
| 2899 | gcuucuguua gccacugauu a |
| 2900 | agcuucuguu agccacugau ua |
| 2901 | gcuucuguua gccacugauu aa |
| 2902 | agcuucuguu agccacugau uaa |
| 2903 | gcuucuguua gccacugauu aaa |
| 2904 | agcuucuguu agccacugau uaaa |
| 2905 | gcuucuguua gccacugauu aaa |
| 2906 | ccauuuguau uuagcauguu ccc |
| 2907 | agauaccauu uguauuuagc |
| 2908 | gccauuucuc aacagaucu |
| 2909 | gccauuucuc aacagaucug uca |
| 2910 | auucucagga auuugugucu uuc |
| 2911 | ucucaggaau uugugucuuu c |
| 2912 | guucagcuuc uguuagcc |
| 2913 | cugauuaaau aucuuuauau c |
| 2914 | gccgccauuu cucaacag |
| 2915 | guauuuagca uguuccca |
| 2916 | caggaauuug ugucuuuc |
| 2917 | gcuuuucuuu uaguugcugc ucuuu |
| 2918 | cuuuucuuuu aguugcugcu cuuuu |
| 2919 | uuuucuuuua guugcugcuc uuuuc |
| 2920 | uuucuuuuag uugcugcucu uuucc |
| 2921 | uucuuuuagu ugcugcucuu uucca |
| 2922 | ucuuuuaguu gcugcucuuu uccag |
| 2923 | cuuuuaguug cugcucuuuu ccagg |
| 2924 | uuuuaguugc ugcucuuuuc caggu |
| 2925 | uuuaguugcu gcucuuuucc agguu |
| 2926 | uuaguugcug cucuuuucca gguuc |
| 2927 | uaguugcugc ucuuuuccag guuca |
| 2928 | aguugcugcu cuuuuccagg uucaa |
| 2929 | guugcugcuc uuuuccaggu ucaag |
| 2930 | uugcugcucu uuuccagguu caagu |
| 2931 | ugcugcucuu uuccagguuc aagug |
| 2932 | gcugcucuuu uccagguuca agugg |
| 2933 | cugcucuuuu ccagguucaa guggg |
| 2934 | ugcucuuuuc cagguucaag uggga |
| 2935 | gcucuuuucc agguucaagu gggac |
| 2936 | cucuuuucca gguucaagug ggaua |
| 2937 | ucuuuuccag guucaagugg gauac |
| 2938 | ucuuuuccag guucaagugg |
| 2939 | cuuuuccagg uucaaguggg auacu |
| 2940 | uuuuccaggu ucaaguggga uacua |
| 2941 | uuuccagguu caagugggau acuag |
| 2942 | uuccagguuc aagugggaua cuagc |
| 2943 | uccagguuca agugggauac uagca |
| 2944 | ccagguucaa gugggauacu agcaa |
| 2945 | cagguucaag ugggauacua gcaau |
| 2946 | agguucaagu gggauacuag caaug |
| 2947 | gguucaagug ggauacuagc aaugu |
| 2948 | guucaagugg gauacuagca auguu |
| 2949 | uucaaguggg auacuagcaa uguua |
| 2950 | ucaaguggga uacuagcaau guuau |
| 2951 | caagugggau acuagcaaug uuauc |
| 2952 | aagugggaua cuagcaaugu uaucu |
| 2953 | agugggauac uagcaauguu aucug |
| 2954 | gugggauacu agcaauguua ucugc |
| 2955 | ugggauacua gcaauguuau cugcu |
| 2956 | gggauacuag caauguuauc ugcuu |
| 2957 | ggauacuagc aauguuaucu gcuuc |
| 2958 | gauacuagca auguuaucug cuucc |
| 2959 | auacuagcaa uguuaucugc uuccu |
| 2960 | uacuagcaau guuaucugcu uccuc |
| 2961 | acuagcaaug uuaucugcuu ccucc |
| 2962 | cuagcaaugu uaucugcuuc cucca |
| 2963 | uagcaauguu aucugcuucc uccaa |
| 2964 | agcaauguua ucugcuuccu ccaac |
| 2965 | gcaauguuau cugcuuccuc caacc |
| 2966 | caauguuauc ugcuuccucc aacca |
| 2967 | aauguuaucu gcuuccucca accau |
| 2968 | auguuaucug cuuccuccaa ccaua |
| 2969 | uguuaucugc uuccuccaac cauaa |
| 2970 | agccucuuga uugcuggucu uguuu |
| 2971 | gccucuugau ugcuggucuu guuuu |
| 2972 | ccucuugauu gcuggucuug uuuuu |
| 2973 | ccucuugauu gcuggucuug |
| 2974 | cucuugauug cuggucuugu uuuuc |
| 2975 | ucuugauugc uggucuuguu uuuca |
| 2976 | cuugauugcu ggucuuguuu uucaa |
| 2977 | uugauugcug gucuuguuuu ucaaa |
| 2978 | ugauugcugg ucuuguuuuu caaau |
| 2979 | gauugcuggu cuuguuuuuc aaauu |
| 2980 | gauugcuggu cuuguuuuuc |
| 2981 | auugcugguc uuguuuuuca aauuu |
| 2982 | uugcuggucu uguuuuucaa auuuu |
| 2983 | ugcuggucuu guuuuucaaa uuuug |
| 2984 | gcuggucuug uuuuucaaau uuugg |
| 2985 | cuggucuugu uuuucaaauu uuggg |
| 2986 | uggucuuguu uuucaaauuu ugggc |
| 2987 | ggucuuguuu uucaaauuuu gggca |
| 2988 | gucuuguuuu ucaaauuuug ggcag |
| 2989 | ucuuguuuuu caaauuuugg gcagc |
| 2990 | cuuguuuuuc aaauuuuggg cagcg |
| 2991 | uuguuuuuca aauuuugggc agcgg |
| 2992 | uguuuuucaa auuuugggca gcggu |
| 2993 | guuuuucaaa uuuugggcag cggua |
| 2994 | uuuuucaaau uuugggcagc gguaa |
| 2995 | uuuucaaauu uugggcagcg guaau |
| 2996 | uuucaaauuu ugggcagcgg uaaug |
| 2997 | uucaaauuuu gggcagcggu aauga |
| 2998 | ucaaauuuug ggcagcggua augag |
| 2999 | caaauuuugg gcagcgguaa ugagu |
| 3000 | aaauuuuggg cagcgguaau gaguu |
| 3001 | aauuuugggc agcgguaaug aguuc |
| 3002 | auuuugggca gcgguaauga guucu |
| 3003 | uuuugggcag cgguaaugag uucuu |
| 3004 | uuugggcagc gguaaugagu ucuuc |
| 3005 | uugggcagcg guaaugaguu cuucc |
| 3006 | ugggcagcgg uaaugaguuc uucca |
| 3007 | gggcagcggu aaugaguucu uccaa |
| 3008 | ggcagcggua augaguucuu ccaac |
| 3009 | gcagcgguaa ugaguucuuc caacu |
| 3010 | cagcgguaau gaguucuucc aacug |
| 3011 | agcgguaaug aguucuucca acugg |
| 3012 | gcgguaauga guucuuccaa cuggg |
| 3013 | cgguaaugag uucuuccaac ugggg |
| 3014 | gguaaugagu ucuuccaacu gggga |
| 3015 | gguaaugagu ucuuccaacu gg |
| 3016 | guaaugaguu cuuccaacug gggac |
| 3017 | uaaugaguuc uuccaacugg ggacg |
| 3018 | aaugaguucu uccaacuggg gacgc |
| 3019 | augaguucuu ccaacugggg acgcc |
| 3020 | ugaguucuuc caacugggga cgccu |
| 3021 | gaguucuucc aacuggggac gccuc |
| 3022 | aguucuucca acuggggacg ccucu |
| 3023 | guucuuccaa cuggggacgc cucug |
| 3024 | uucuuccaac uggggacgcc ucugu |
| 3025 | ucuuccaacu ggggacgccu cuguu |
| 3026 | cuuccaacug gggacgccuc uguuc |
| 3027 | uuccaacugg ggacgccucu guucc |
| 3028 | uccaacuggg gacgccucug uucca |
| 3029 | ccaacugggg acgccucugu uccaa |
| 3030 | caacugggga cgccucuguu ccaaa |
| 3031 | aacuggggac gccucuguuc caaau |
| 3032 | acuggggacg ccucuguucc aaauc |
| 3033 | cuggggacgc cucuguucca aaucc |
| 3034 | uggggacgcc ucuguuccaa auccu |
| 3035 | ggggacgccu cuguuccaaa uccug |
| 3036 | gggacgccuc uguuccaaau ccugc |
| 3037 | ggacgccucu guuccaaauc cugca |
| 3038 | gacgccucug uuccaaaucc ugcau |
| 3039 | ccaauagugg ucaguccagg agcua |
| 3040 | caauaguggu caguccagga gcuag |
| 3041 | aauagugguc aguccaggag cuagg |
| 3042 | auagugguca guccaggagc uaggu |
| 3043 | auagugguca guccaggagc u |
| 3044 | uaguggucag uccaggagcu agguc |
| 3045 | aguggucagu ccaggagcua gguca |
| 3046 | guggucaguc caggagcuag gucag |
| 3047 | uggucagucc aggagcuagg ucagg |
| 3048 | ggucagucca ggagcuaggu caggc |
| 3049 | gucaguccag gagcuagguc aggcu |
| 3050 | ucaguccagg agcuagguca ggcug |
| 3051 | caguccagga gcuaggucag gcugc |
| 3052 | aguccaggag cuaggucagg cugcu |
| 3053 | guccaggagc uaggucaggc ugcuu |
| 3054 | uccaggagcu aggucaggcu gcuuu |
| 3055 | ccaggagcua ggucaggcug cuuug |
| 3056 | caggagcuag gucaggcugc uuugc |
| 3057 | aggagcuagg ucaggcugcu uugcc |
| 3058 | ggagcuaggu caggcugcuu ugccc |
| 3059 | gagcuagguc aggcugcuuu gcccu |
| 3060 | agcuagguca ggcugcuuug cccuc |
| 3061 | gcuaggucag gcugcuuugc ccuca |
| 3062 | cucagcucuu gaaguaaacg guuua |
| 3063 | cagcucuuga aguaaacggu uuacc |
| 3064 | gcucuugaag uaaacgguuu accgc |
| 3065 | cuaggucagg cugcuuugcc cucag |
| 3066 | uaggucaggc ugcuuugccc ucagc |
| 3067 | aggucaggcu gcuuugcccu cagcu |
| 3068 | ggucaggcug cuuugcccuc agcuc |
| 3069 | gucaggcugc uuugcccuca gcucu |
| 3070 | ucaggcugcu uugcccucag cucuu |
| 3071 | caggcugcuu ugcccucagc ucuug |
| 3072 | aggcugcuuu gcccucagcu cuuga |
| 3073 | ggcugcuuug cccucagcuc uugaa |
| 3074 | gcugcuuugc ccucagcucu ugaag |
| 3075 | cugcuuugcc cucagcucuu gaagu |
| 3076 | ugcuuugccc ucagcucuug aagua |
| 3077 | gcuuugcccu cagcucuuga aguaa |
| 3078 | cuuugcccuc agcucuugaa guaaa |
| 3079 | uuugcccuca gcucuugaag uaaac |
| 3080 | uugcccucag cucuugaagu aaacg |
| 3081 | ugcccucagc ucuugaagua aacgg |
| 3082 | gcccucagcu cuugaaguaa acggu |
| 3083 | cccucagcuc uugaaguaaa cgguu |
| 3084 | ccucagcucu ugaaguaaac |
| 3085 | ccucagcucu ugaaguaaac g |
| 3086 | cucagcucuu gaaguaaacg |
| 3087 | ccucagcucu ugaaguaaac gguuu |
| 3088 | ucagcucuug aaguaaacgg uuuac |
| 3089 | agcucuugaa guaaacgguu uaccg |
| 3090 | cucuugaagu aaacgguuua ccgcc |
| 3091 | ccacaggcgu ugcacuuugc aaugc |
| 3092 | cacaggcguu gcacuuugca augcu |
| 3093 | acaggcguug cacuuugcaa ugcug |
| 3094 | caggcguugc acuuugcaau gcugc |
| 3095 | aggcguugca cuuugcaaug cugcu |
| 3096 | ggcguugcac uuugcaaugc ugcug |
| 3097 | gcguugcacu uugcaaugcu gcugu |
| 3098 | cguugcacuu ugcaaugcug cuguc |
| 3099 | cguugcacuu ugcaaugcug cug |
| 3100 | guugcacuuu gcaaugcugc ugucu |
| 3101 | uugcacuuug caaugcugcu gucuu |
| 3102 | ugcacuuugc aaugcugcug ucuuc |
| 3103 | gcacuuugca augcugcugu cuucu |
| 3104 | cacuuugcaa ugcugcuguc uucuu |
| 3105 | acuuugcaau gcugcugucu ucuug |
| 3106 | cuuugcaaug cugcugucuu cuugc |
| 3107 | uuugcaaugc ugcugucuuc uugcu |
| 3108 | uugcaaugcu gcugucuucu ugcua |
| 3109 | ugcaaugcug cugucuucuu gcuau |
| 3110 | gcaaugcugc ugucuucuug cuaug |
| 3111 | caaugcugcu gucuucuugc uauga |
| 3112 | aaugcugcug ucuucuugcu augaa |
| 3113 | augcugcugu cuucuugcua ugaau |
| 3114 | ugcugcuguc uucuugcuau gaaua |
| 3115 | gcugcugucu ucuugcuaug aauaa |
| 3116 | cugcugucuu cuugcuauga auaau |
| 3117 | ugcugucuuc uugcuaugaa uaaug |
| 3118 | gcugucuucu ugcuaugaau aaugu |
| 3119 | cugucuucuu gcuaugaaua auguc |
| 3120 | ugucuucuug cuaugaauaa uguca |
| 3121 | gucuucuugc uaugaauaau gucaa |
| 3122 | ucuucuugcu augaauaaug ucaau |
| 3123 | cuucuugcua ugaauaaugu caauc |
| 3124 | uucuugcuau gaauaauguc aaucc |
| 3125 | ucuugcuaug aauaauguca auccg |
| 3126 | cuugcuauga auaaugucaa uccga |
| 3127 | uugcuaugaa uaaugucaau ccgac |
| 3128 | ugcuaugaau aaugucaauc cgacc |
| 3129 | gcuaugaaua augucaaucc gaccu |
| 3130 | cuaugaauaa ugucaauccg accug |
| 3131 | uaugaauaau gucaauccga ccuga |
| 3132 | augaauaaug ucaauccgac cugag |
| 3133 | ugaauaaugu caauccgacc ugagc |
| 3134 | gaauaauguc aauccgaccu gagcu |
| 3135 | aauaauguca auccgaccug agcuu |
| 3136 | auaaugucaa uccgaccuga gcuuu |
| 3137 | uaaugucaau ccgaccugag cuuug |
| 3138 | aaugucaauc cgaccugagc uuugu |
| 3139 | augucaaucc gaccugagcu uuguu |
| 3140 | ugucaauccg accugagcuu uguug |
| 3141 | gucaauccga ccugagcuuu guugu |
| 3142 | ucaauccgac cugagcuuug uugua |
| 3143 | caauccgacc ugagcuuugu uguag |
| 3144 | aauccgaccu gagcuuuguu guaga |
| 3145 | auccgaccug agcuuuguug uagac |
| 3146 | uccgaccuga gcuuuguugu agacu |
| 3147 | ccgaccugag cuuuguugua gacua |
| 3148 | cgaccugagc uuuguuguag |
| 3149 | cgaccugagc uuuguuguag acuau |
| 3150 | gaccugagcu uuguuguaga cuauc |
| 3151 | accugagcuu uguuguagac uauca |
| 3152 | ccugagcuuu guuguagacu auc |
| 3153 | cauuuuugac cuacaugugg |
| 3154 | uuugaccuac auguggaaag |
| 3155 | uacauuuuug accuacaugu ggaaag |
| 3156 | ggucuccuua ccuauga |
| 3157 | ucuuaccuau gacuauggau gaga |
| 3158 | auuuuugacc uacaugggaa ag |
| 3159 | uacgaguuga uugucggacc cag |
| 3160 | guggucuccu uaccuaugac ugugg |
| 3161 | ugucucagua aucuucuuac cuau |
| 3162 | ugcauguucc agucguugug ugg |
| 3163 | cacuauucca gucaaauagg ucugg |
| 3164 | auuuaccaac cuucaggauc gagua |
| 3165 | ggccuaaaac acauacacau a |
| 3166 | gauagguggu aucaacaucu guaa |
| 3167 | gauagguggu aucaacaucu g |
| 3168 | cuuccuggau ggcuugaau |
| 3169 | uguuguuguu uaugcucauu |
| 3170 | guacauuaag auggacuuc |
| 3171 | cuguugcagu aaucuaugag |
| 3172 | ugcaguaauc uaugaguuuc |
| 3173 | gagucuucua ggagccuu |
| 3174 | ugccauuguu ucaucagcuc uuu |
| 3175 | uccuguagga cauuggcagu |
| 3176 | cuuggagucu ucuaggagcc |
| 3177 | ccauuuugug aauguuuucu uuugaacauc |
| 3178 | cccauuuugu gaauguuuuc uuuu |
| 3179 | gaaaauugug cauuuaccca uuuu |
| 3180 | uugugcauuu acccauuuug ug |
| 3181 | cccugaggca uucccaucuu gaau |
| 3182 | aggacuuacu ugcuuuguuu |
| 3183 | cuugaauuua ggagauucau cug |
| 3184 | caucuucuga uaauuuuccu guu |
| 3185 | ccauuacagu ugucuguguu |
| 3186 | ugacagccug ugaaaucugu gag |
| 3187 | uaaucugccu cuucuuuugg |
| 3188 | cagcaguagu ugucaucugc |
| 3189 | gccugagcug aucugcuggc aucuugc |
| 3190 | gccugagcug aucugcuggc aucuugcagu u |
| 3191 | ucugcuggca ucuugc |
| 3192 | gccgguugac uucauccugu gc |
| 3193 | gucugcaucc aggaacaugg guc |
| 3194 | uacuuacugu cuguagcucu uucu |
| 3195 | cugcauccag gaacaugggu cc |
| 3196 | guugaagauc ugauagccgg uuga |
| 3197 | uaggugccug ccggcuu |
| 3198 | uucagcugua gccacacc |
| 3199 | cugaacugcu ggaaagucgc c |
| 3200 | cuggcuucca aaugggaccu gaaaaagaac |
| 3201 | caauuuuucc cacucaguau u |
| 3202 | uugaaguucc uggagucuu |
| 3203 | uccucaggag gcagcucuaa au |
| 3204 | uggcucucuc ccaggg |
| 3205 | gagauggcuc ucucccaggg acccugg |
| 3206 | gggcacuuug uuuggcg |
| 3207 | ggucccagca aguuguuug |
| 3208 | ugggaugguc ccagcaaguu guuug |
| 3209 | guagagcucu gucauuuugg g |
| 3210 | gcucaagaga uccacugcaa aaaac |
| 3211 | gccauacgua cguaucauaa acauuc |
| 3212 | ucugcaggau auccaugggc ugguc |
| 3213 | gauccucccu guucgucccc uauuaug |
| 3214 | ugcuuuagac uccuguaccu gaua |
| 3215 | ggcggccuuu guguugac |
| 3216 | ggacaggccu uuauguucgu gcugc |
| 3217 | ccuuuauguu cgugcugcu |
| 3218 | ucaaggaaga uggcauuucu |
| 3219 | ucaangaaga uggcauuucu |
| 3220 | ucaagnaaga uggcauuucu |
| 3221 | ucaaggaana uggcauuucu |
| 3222 | ucaaggaaga ungcauuucu |
| 3223 | ucaaggaaga ugncauuucu |
| 3224 | ncaaggaaga uggcauuucu |
| 3225 | ucaaggaaga nggcauuucu |
| 3226 | ucaaggaaga uggcanuucu |
| 3227 | ucaaggaaga uggcaunucu |
| 3228 | ucaaggaaga uggcauuncu |
| 3229 | ucaaggaaga uggcauuucn |
| 3230 | ucnaggaaga uggcauuucu |
| 3231 | ucanggaaga uggcauuucu |
| 3232 | ucaaggnaga uggcauuucu |
| 3233 | ucaagganga uggcauuucu |
| 3234 | ucaaggaagn uggcauuucu |
| 3235 | ucaaggaaga uggcnuuucu |
| 3236 | uuugccncug cccaaugcca uccug |
| 3237 | uuugccgcun cccaaugcca uccug |
| 3238 | uuugccgcug cccaauncca uccug |
| 3239 | uuunccgcug cccaaugcca uccug |
| 3240 | uuugccgcug cccaaugcca uccun |
| 3241 | nuugccgcug cccaaugcca uccug |
| 3242 | unugccgcug cccaaugcca uccug |
| 3243 | uungccgcug cccaaugcca uccug |
| 3244 | uuugccgcng cccaaugcca uccug |
| 3245 | uuugccgcug cccanugcca uccug |
| 3246 | uuugccgcug cccaaugccn uccug |
| 3247 | uuunccncug cccaaugcca uccug |
| 3248 | uuugccgcug cccaangcca uccug |
| 3249 | uuugccgcug cccaaugcca nccug |
| 3250 | uuugccgcug cccaaugcca uccng |
| 3251 | uuugccgcug cccnaugcca uccug |
| 3252 | ucagcuucun uuagccacug |
| 3253 | ucagcuucug uuanccacug |
| 3254 | ucancuucug uuagccacug |
| 3255 | ucagcuucug uuagccacun |
| 3256 | gnnnnnnnnn nnnngnnnn |
| 3257 | nnngnnnnng nnngnnnnng |
| 3258 | nnngnnnnnn gnnngnnnnn |
| 3259 | nnnnnnnggn nnnngngnnn nnn |
| 3260 | nnnnnngnnn nnngnnngnn nnn |
| 3261 | nnnnnggnnn nngngnnnnn n |
| 3262 | gnnnnnnnnn nnnngnnnng nnn |
| 3263 | nnngnngnng nnnnnngnnn nnnng |
| 3264 | nngnngnngn nnnnngnnnn nnng |
| 3265 | nngnngnngn nnnnngnnnn nnngg |
| 3266 | ngnngnngnn nnnngnnnnn nng |
| 3267 | ngnngnngnn nnnngnnnnn nngg |
| 3268 | gnngnngnnn nnngnnnnnn ng |
| 3269 | nngnngnnnn nngnnnnnnn gg |
| 3270 | nnngnnnnng nnnnnngnnn nnnng |
| 3271 | nngnnngnng nngnnnnnng nnnnn |
| 3272 | nngnnngnng nngnnnnnng nnnnnnnggn |
| 3273 | nnnnggnngn nggnnnnnnn |
| 3274 | nggnnnnnnn ngnnngg |
| 3275 | nnnnnnggnn gnnggnnnnn nn |
| 3276 | nnnnnnnnng gnngnnggnn nnnnn |
| 3277 | nnnnngngnn nnnnnnnnnn gnn |
| 3278 | nnngngnngg nnnnnnnnnn nnn |
| 3279 | nnnnnnnggn ngnnggnnnn nnnngnnngg |
| 3280 | nnnnnnnggn ngnnggnnnn nnnng |
| 3281 | nnnnngnnng nnggnnnngn nnnnn |
| 3282 | ggnnnngngn nnnnnnnnnn gg |
| 3283 | nnnngnnngn nggnnnngnn nnnnn |
| 3284 | nnnnnnnngg ggnngnnnnn gnnnn |
| 3285 | ngnnnnngnn nnnngnnngn nggnn |
| 3286 | nngnngnnnn nggnnnng |
| 3287 | nnnnngnngn nnnnggnnnn gn |
| 3288 | nnnnngnngn nnnnggnnnn gnn |
| 3289 | nnnnngnngn nnnnggnnnn gnng |
| 3290 | nngnngnnnn nggnnnngnn gg |
| 3291 | nngnngnnnn nggnnnngnn ggn |
| 3292 | nngnngnnnn nggnnnngnn ggng |
| 3293 | nngnngnnnn nggnnnngnn ggngn |
| 3294 | gnngnnnnng gnnnngnngg ngnnn |
| 3295 | gnnnnnggnn nngnnggngn nnnng |
| 3296 | nngnnnnngg nnnngnnggn gnnnnngnnn |
| 3297 | nngnngnnnn nggnnnngnn ggngnnnnng |
| 3298 | nnnnngnngn nnnnggnnnn gnnggngnnn nng |
| 3299 | gngnnnnnnn nnnngnngnn nnnn |
| 3300 | nnngngnnnn nnnnnnngnn gnnnn |
| 3301 | ngnnnnnngn nggnnnnngg nngn |
| 3302 | nnnnnngnng gnnnnnggnn gnng |
| 3303 | nnnngnnggn nnnnggnngn ngnn |
| 3304 | nngnnggnnn nnggnngnng nnnn |
| 3305 | nnnnnnnnnn ngn |
| 3306 | ngnnnnngnn ngnnn |
| 3307 | nnnnnnnggn n |
| 3308 | nnnngnnnnn ngnn |
| 3309 | nnnnnnnnnn ngnnnngnnn |
| 3310 | nnnnnnnnnn ngn |
| 3311 | nnngnnnngn nn |
| 3312 | nnngnngnng nnnnnngnnn |
| 3313 | ngnngnnnnn ngnnnnnnng |
| 3314 | gnngnngnnn nnngnnnnnn |
| 3315 | nnggnngnng gnn |
| 3316 | nggnngnngg nn |
| 3317 | ngngnnggnn |
| 3318 | ngnnggnnnn nnnn |
| 3319 | nnnnnnnnnn |
| 3320 | nnngngnnnn nnnnn |
| 3321 | nngngnnnnn nnn |
| 3322 | ngnnnnnnnn |
| 3323 | ngnnnnnngn |
| 3324 | gnngnnnnng gnnnngnngg |
| 3325 | nnnnggnnnn gnnggngnnn |
| 3326 | nnnnnggnnn ngnnggn |
| 3327 | ngnnnnnnnn nnngnn |
| 3328 | ngnnnnnnnn n |
| 3329 | ngnnnnnngn nggnnnnngg nn |
| 3330 | ngnnnnnngn n |
| 3331 | nnnnngnngg n |
| 3332 | nggnnnnngg nn |
| 3333 | guugccuccg guucugaagg uguuc |
| 3334 | guugnnunng guunugaagg uguun |
| 3335 | caacaucaag gaagauggca uuucu |
| 3336 | gccauuucuc aacagaucu |
| 3337 | ucagcuucug uuagccacug |
| 3338 | uuuguauuua gcauguuccc |
| 3339 | auucucagga auuugugucu uuc |
| 3340 | ccauuuguau uuagcauguu ccc |
| 3341 | ucucaggaau uugugucuuu c |
| 3342 | gccauuucuc aacagaucug uca |
| 3343 | uuugccgcug cccaaugcca uccug |
| 3344 | uugccgcugc ccaaugccau ccug |
| 3345 | uugccgcugc ccaaugccau ccugg |
| 3346 | ugccgcugcc caaugccauc cug |
| 3347 | ugccgcugcc caaugccauc cugg |
| 3348 | gccgcugccc aaugccaucc ug |
| 3349 | ccgcugccca augccauccu gg |
| 3350 | uuugccncug cccaaugcca uccug |
| 3351 | caguuugccg cugcccaaug ccauc |
| 3352 | caguuugccg cugcccaaug ccauccugga |
| 3353 | ucaaggaaga uggcauuucu |
| 3354 | uggcauuucu aguuugg |
| 3355 | caucaaggaa gauggcauuu cu |
| 3356 | caacaucaag gaagauggca uuucu |
| 3357 | ccucugugau uuuauaacuu gau |
| 3358 | ccagagcagg uaccuccaac auc |
| 3359 | acaucaagga agauggcauu ucuaguuugg |
| 3360 | acaucaagga agauggcauu ucuag |
| 3361 | cucuugauug cuggucuugu uuuuc |
| 3362 | gguaaugagu ucuuccaacu gg |
| 3363 | ucuugauugc uggucuuguu uuuca |
| 3364 | uuccaacugg ggacgccucu guucc |
| 3365 | uguucuagcc ucuugauugc ugguc |
| 3366 | cuguugccuc cgguucug |
| 3367 | caacuguugc cuccgguucu ga |
| 3368 | caacuguugc cuccgguucu gaa |
| 3369 | caacuguugc cuccgguucu gaag |
| 3370 | cuguugccuc cgguucugaa gg |
| 3371 | cuguugccuc cgguucugaa ggu |
| 3372 | cuguugccuc cgguucugaa ggug |
| 3373 | cuguugccuc cgguucugaa ggugu |
| 3374 | guugccuccg guucugaagg uguuc |
| 3375 | gccuccgguu cugaaggugu ucuug |
| 3376 | uugccuccgg uucugaaggu guucuuguac |
| 3377 | cuguugccuc cgguucugaa gguguucuug |
| 3378 | caacuguugc cuccgguucu gaagguguuc uug |
| 3379 | gaguuucuuc caaagcagcc ucuc |
| 3380 | uaugaguuuc uuccaaagca gccuc |
| 3381 | agcauccugu aggacauugg cagu |
| 3382 | cauccuguag gacauuggca guug |
| 3383 | uccuguagga cauuggcagu uguu |
| 3384 | cuguaggaca uuggcaguug uuuc |
| 3385 | auuucucaac aga |
| 3386 | agcuucuguu agcca |
| 3387 | auucucagga a |
| 3388 | auuuguauuu agca |
| 3389 | auuucucaac agaucuguca |
| 3390 | auuucucaac aga |
| 3391 | acagaucugu ca |
| 3392 | uuugccgcug cccaaugcca |
| 3393 | cgcugcccaa ugccauccug |
| 3394 | gccgcugccc aaugccaucc |
| 3395 | aaggaagaug gca |
| 3396 | aggaagaugg ca |
| 3397 | agagcaggua |
| 3398 | agcagguacc ucca |
| 3399 | accuccaaca |
| 3400 | aaugaguucu uccaa |
| 3401 | augaguucuu cca |
| 3402 | aguucuucca |
| 3403 | agccucuuga |
| 3404 | guugccuccg guucugaagg |
| 3405 | cuccgguucu gaagguguuc |
| 3406 | ccuccgguuc ugaaggu |
| 3407 | aguuucuucc aaagca |
| 3408 | aguuucuucc a |
| 3409 | agcauccugu aggacauugg ca |
| 3410 | agcauccugu a |
| 3411 | auccuguagg a |
| 3412 | aggacauugg ca |
| 3413 | gguaaugagu unuunnaanu gg |
| 3414 | ggnaangagn ncnnccaacn gg |
| 3415 | ggunnugngu ucuuccnncu gg |
| 3416 | ggnaangagn nnnnnnaann gg |
| 3417 | ggunnugngu unuunnnnnu gg |
| 3418 | ggnnnngngn ncnnccnncn gg |
| 3419 | ggnnnngngn nnnnnnnnnn gg |
| 3420 | uguunuagnn unuugauugn uggun |
| 3421 | ngnncnagcc ncnnganngc nggnc |
| 3422 | uguucungcc ucuugnuugc ugguc |
| 3423 | ngnnnnagnn nnnnganngn nggnn |
| 3424 | uguunungnn unuugnuugn uggun |
| 3425 | ngnncnngcc ncnngnnngc nggnc |
| 3426 | ngnnnnngnn nnnngnnngn nggnn |
| 3427 | gaguuunuun naaagnagnn unun |
| 3428 | gagnnncnnc caaagcagcc ncnc |
| 3429 | gnguuucuuc cnnngcngcc ucuc |
| 3430 | gagnnnnnnn naaagnagnn nnnn |
| 3431 | gnguuunuun nnnngnngnn unun |
| 3432 | gngnnncnnc cnnngcngcc ncnc |
| 3433 | gngnnnnnnn nnnngnngnn nnnn |
| 3434 | agnaunnugu agganauugg nagu |
| 3435 | agcanccngn aggacanngg cagn |
| 3436 | ngcnuccugu nggncnuugg cngu |
| 3437 | agnannnngn aggananngg nagn |
| 3438 | ngnnunnugu nggnnnuugg nngu |
| 3439 | ngcnnccngn nggncnnngg cngn |
| 3440 | ngnnnnnngn nggnnnnngg nngn |
| 3441 | guugnnunng guunugaagg uguun |
| 3442 | uuugnngnug nnnaaugnna unnug |
| 3443 | nunuugauug nuggunuugu uuuun |
| 3444 | ncaaggaaga nggcannncn |
| 3445 | nnaaggaaga nggnannnnn |
| 3446 | ncagcnncng nnagccacng |
| 3447 | nnagnnnnng nnagnnanng |
| 3448 | ucnnggnngn uggcnuuucu |
| 3449 | ucngcuucug uungccncug |
| 3450 | unagnuunug uuagnnanug |
| 3451 | nnngnngnng nnnaangnna nnnng |
| 3452 | uuugccgcug cccnnugccn uccug |
| 3453 | gnngccnccg gnncngaagg ngnnc |
| 3454 | gnngnnnnng gnnnngaagg ngnnn |
| 3455 | guugccuccg guucugnngg uguuc |
| 3456 | ggccaaaccn cggcnnaccn |
| 3457 | unaaggaaga uggnauuunu |
| 3458 | ggccaaaccu cggcuuaccu |
| 3459 | guugnnuccg guunugaagg uguun |
| 3460 | guugnnuccg guucugaagg uguuc |
| 3461 | guugcnuccg guunugaagg uguun |
| 3462 | ngaaaacgcc gccannncnc aacagancng |
| 3463 | canaangaaa acgccgccan nncncaacag |
| 3464 | ngnncagcnn cngnnagcca cngannaaan |
| 3465 | cagnnngccg cngcccaang ccanccngga |
| 3466 | nngccgcngc ccaangccan ccnggagnnc |
| 3467 | ngcngcncnn nnccaggnnc aagngggana |
| 3468 | cnnnnagnng cngcncnnnn ccaggnncaa |
| 3469 | cnnnncnnnn agnngcngcn cnnnnccagg |
| 3470 | nnagnngcng cncnnnncca ggnncaagng |
| 3471 | cngnngccnc cggnncngaa ggngnncnng |
| 3472 | caacngnngc cnccggnncn gaaggngnnc |
| 3473 | nngccnccgg nncngaaggn gnncnngnac |
| 3474 | tgaaaacgcc gccatttctc aacagatctg |
| 3475 | cataatgaaa acgccgccat ttctcaacag |
| 3476 | tgttcagctt ctgttagcca ctgattaaat |
| 3477 | cagtttgccg ctgcccaatg ccatcctgga |
| 3478 | ttgccgctgc ccaatgccat cctggagttc |
| 3479 | tgctgctctt ttccaggttc aagtgggata |
| 3480 | cttttagttg ctgctctttt ccaggttcaa |
| 3481 | cttttctttt agttgctgct cttttccagg |
| 3482 | ttagttgctg ctcttttcca ggttcaagtg |
| 3483 | ctgttgcctc cggttctgaa ggtgttcttg |
| 3484 | caactgttgc ctccggttct gaaggtgttc |
| 3485 | ttgcctccgg ttctgaaggt gttcttgtac |
| 3486 | rrrqrrkkr |
| 3487 | rkkrrqrrr |
| 3488 | rrrrrrrrrff |
| 3489 | rrrrrffrrrr |
| 3490 | rrrr |
| 3491 | rrrrr |
| 3492 | rrrrrr |
| 3493 | rrrrrrr |
| 3494 | rrrrrrrr |
| 3495 | rrrrrrrrr |
| 3496 | rahxrahxrahxrahxrahxrahxrahxrahx |
| 3497 | rahxrrahxrrahxrrahxr |
| 3498 | rahxrrahxrrahxrrahxrrahxr |
| 3499 | rahxrrbrrahxrrbr |
| 3500 | rarrarrarrarff |
| 3501 | rgrrgrrgrrgrff |
| 3502 | MQKLQLCVYIYLFMLIVAGPVDLNENSEQKENVEKEGLCNACTWRQN |
| | TKSSRIEAIKIQILSKLRLETAPNISKDVIRQLLPKAPPLRELIDQYDVQRD |
| | DSSDGSLEDDDYHATTETIITMPTESDFLMQVDGKPKCCFFKFSSKIQYN |
| | KVVKAQLWIYLRPVETPTTVFVQILRLIKPMKDGTRYTGIRSLKLDMNP |
| | GTGIWQSIDVKTVLQNWLKQPESNLGIEIKALDENGHDLAVTFPGPGED |
| | GLNPFLEVKVTDTPKRSRRDFGLDCDEHSTESRCCRYPLTVDFEAFGW |
| | DWIIAPKRYKANYCSGECEFVFLQKYPHTHLVHQANPRGSAGPCCTPT |
| | KMSPINMLYFNGKEQIIYGKIPAMVVDRCGCS |
| 3503 | MTAPWVALALLWGSLCAGSGRGEAETRECIYYNANWELERTNQSGLE |
| | RCEGEQDKRLHCYASWRNSSGTIELVKKGCWLDDFNCYDRQECVATE |
| | ENPQVYFCCCEGNFCNERFTHLPEAGGPEVTYEPPPTAPTLLTVLAYSL |
| | LPIGGLSLIVLLAFWMYRHRKPPYGHVDIHEDPGPPPPSPLVGLKPLQLL |
| | EIKARGRFGCVWKAQLMNDFVAVKIFPLQDKQSWQSEREIFSTPGMKH |
| | ENLLQFIAAEKRGSNLEVELWLITAFHDKGSLTDYLKGNIITWNELCHV |
| | AETMSRGLSYLHEDVPWCRGEGHKPSIAHRDFKSKNVLLKSDLTAVLA |
| | DFGLAVRFEPGKPPGDTHGQVGTRRYMAPEVLEGAINFQRDAFLRIDM |
| | YAMGLVLWELVSRCKAADGPVDEYMLPFEEEIGQHPSLEELQEVVVH |
| | KKMRPTIKDHWLKHPGLAQLCVTIEECWDHDAEARLSAGCVEERVSLI |
| | RRSVNGTTSDCLVSLVTSVTNVDLPPKESSI |

[0793] In embodiments, any uracil (U) or thymine (T) nucleotide in any of the modified antisense oligomer as described herein may be substituted with an X or n. In embodiments, each X or n is independently selected from uracil (U) or thymine (T).

1.-99. (canceled)

100. A method of treating a subject with Duchenne muscular dystrophy or related disorders having a mutation in the dystrophin gene that is amenable to treatment by an antisense oligomer capable of inducing exon skipping during processing of dystrophin pre-mRNA, the method comprising:
administering to a subject an effective amount of an antisense oligomer comprising 17 to 40 subunits, and further comprising a targeting sequence complementary to 12 or more contiguous nucleotides in a target region comprising an exon of human dystrophin pre-mRNA, wherein the antisense oligomer induces skipping of the exon;
wherein the antisense oligomer comprises at least one subunit that is a nucleotide analog having (i) a modified internucleoside linkage, (ii) a modified sugar moiety, or (iii) a combination of the foregoing; and
wherein the subject has been administered a myostatin therapeutic that inhibits one or both of myostatin activity and myostatin expression in the subject, to thereby treat at least one of Duchenne muscular dystrophy or related disorders.

101. The method of claim 100, wherein the antisense oligomer comprises a sequence selected from SEQ ID NOS: 76-3485.

102. The method of claim 101, wherein the antisense oligomer is eteplirsen.

103. The method of claim 100, wherein the myostatin therapeutic is selected from one or more of a protein or nucleic acid.

104. The method of claim 103, wherein the protein is an anti-myostatin antibody.

105. The method of claim 103, wherein the protein is a soluble receptor.

106. The method of claim 105, wherein the soluble receptor is ACVR2.

107. The method of claim 103, wherein the nucleic acid is at least one of an antisense oligomer or an siRNA.

108. The method of claim 107, wherein the antisense oligomer comprises 12 to 40 subunits, and further comprises a targeting sequence complementary to 12 or more contiguous nucleotides in a target region of myostatin pre-mRNA; and
wherein the antisense oligomer comprises at least one subunit that is a nucleotide analog having (i) a modified internucleoside linkage, (ii) a modified sugar moiety, or (iii) a combination of the foregoing.

109. The method of claim 100, wherein the antisense oligomer is according to formula (I): [chemical structure]
or a pharmaceutically acceptable salt thereof, wherein:
each Nu is a nucleobase which taken together form a targeting sequence;
Z is an integer from 15 to 38;
each Y is independently selected from —O— and —NR⁴—;
each R⁴ is independently selected from H, C₁-C₆ alkyl, aralkyl, —C(NH)NH₂, —C(O)(CH₂)ₙNR⁵C(NH)NH₂, —C(O)(CH₂)₂NHC(O)(CH₂)₅NR⁵C(NH)NH₂, and -G;
R⁵ is selected from H and C₁-C₆ alkyl;
n is an integer from 1 to 5;
T is selected from OH and a moiety of the formula: [chemical structure]
A is selected from —OH and —N(R⁷)₂R⁸;
each R⁷ is independently selected from H and C₁-C₆ alkyl;
R⁸ is selected from an electron pair and H;
R⁶ is selected from —OH, —N(R⁹)CH₂C(O)NH₂, and a moiety of the formula: [chemical structure]
R⁹ is selected from H and C₁-C₆ alkyl;
R¹⁰ is selected from -G, —C(O)R¹¹OH, acyl, trityl, 4-methoxytrityl, —C(NH)NH₂, —C(O)(CH₂)ₘNR¹²C(NH)NH₂, and —C(O)(CH₂)₂NHC(O)(CH₂)₅NR¹²C(NH)NH₂;
m is an integer from 1 to 5;
R¹¹ is of the formula —(O-alkyl)_{y}-;
y is an integer from 3 to 10;
each of the y alkyl groups is independently selected from C₂-C₆ alkyl;
R¹² is selected from H and C₁-C₆ alkyl;
each instance of R¹ is independently selected from —N(R¹³)₂R¹⁴, a moiety of formula (II): [chemical structure]
and
a moiety of formula (III): [chemical structure]
each R¹³ is independently selected from H and C₁-C₆ alkyl;
R¹⁴ is selected from an electron pair and H;
R¹⁵ is selected from H, -G, C₁-C₆ alkyl, —C(NH)NH₂, —C(O)(CH₂)_{q}NR¹⁸C(NH)NH₂, and —C(O)(CH₂)₂NHC(O)(CH₂)₅NR¹⁸C(═NH)NH₂;
R¹⁸ is selected from H and C₁-C₆ alkyl;
q is an integer from 1 to 5;
R¹⁶ is selected from an electron pair and H;
each R¹⁷ is independently selected from H and methyl;
R¹⁹ is selected from H, C₁-C₆ alkyl, —C(NH)NH₂, —C(O)(CH₂)ᵣNR²²C(NH)NH₂, —C(O)CH(NH₂)(CH₂)₃NHC(NH)NH₂, —C(O)(CH₂)₂NHC(O)(CH₂)₅NR²²C(NH)NH₂, —C(O)CH(NH₂)(CH₂)₄NH₂ and -G;
R²² is selected from H and C₁-C₆ alkyl;
r is an integer from 1 to 5,
R²⁰ is selected from H and C₁-C₆ alkyl;
R²¹ is selected from an electron pair and H;
R² is selected from H, G, acyl, trityl, 4-methoxytrityl, C₁-C₆ alkyl, —C(NH)NH₂, —C(O)R²³,
C(O)(CH₂)ₛNR²⁴C(═NH)NH₂, —C(O)(CH₂)₂NHC(O)(CH₂)₅NR²⁴C(NH)NH₂, —C(O)CH(NH₂)(CH₂)₃NHC(═NH)NH₂, and a moiety of the formula: [chemical structure]
R²³ is of the formula —(O-alkyl)-OH wherein v is an integer from 3 to 10 and each of the v alkyl groups is independently selected from C₂-C₆ alkyl;
R²⁴ is selected from H and C₁-C₆ alkyl;
s is an integer from 1 to 5;
L is selected from —C(O)(CH₂)₆C(O)— and —C(O)(CH₂)₂S₂(CH₂)₂C(O)—;
each R²⁵ is of the formula —(CH₂)₂₀C(O)N(R²⁶)₂;
each R²⁶ is —(CH₂)₆NHC(NH)NH₂;
R³ is selected from an electron pair, H, and C₁-C₆ alkyl; and
G is a cell penetrating peptide (“CPP”) and linker moiety selected from —C(O)(CH₂)₅NH—CPP, —C(O)(CH₂)₂NH—CPP, —C(O)(CH₂)₂NHC(O)(CH₂)₅NH—CPP, and —C(O)CH₂NH—CPP, or G is of the formula: [chemical structure]
wherein the CPP is attached to the linker moiety by an amide bond at the CPP carboxy terminus, with the proviso that up to one instance of G is present.

110. The method of claim 109, wherein R² is G, and the CPP comprises a sequence selected from SEQ ID NOS: 3486-3501.

111. A method of treating Duchenne muscular dystrophy or related disorders, the method comprising:
administering to a subject an effective amount of an antisense oligomer of 12 to 40 subunits comprising a targeting sequence complementary to 12 or more contiguous nucleotides of an exon of human myostatin pre-mRNA; and
wherein, the antisense oligomer comprises at least one subunit that is a nucleotide analog having (i) a modified internucleoside linkage, (ii) a modified sugar moiety, or (iii) a combination of the foregoing; and
wherein, the subject has been administered a dystrophin therapeutic that increases the expression of a functional dystrophin protein in muscle cells of the subject, to thereby treat at least one of Duchenne muscular dystrophy or related disorders.

112. The method of claim 111, wherein the target region is selected from (i) a nucleotide sequence wherein at least one nucleotide spans a splice junction associated with intron 1/exon 2 and exon 2/intron 2; or (ii) a nucleotide sequence wherein no nucleotide spans a splice junction associated with intron 1/exon 2 and exon 2/intron 2.

113. The method of claim 112, wherein the splice junction is selected from a sequence comprising a splice acceptor site or a splice donor site.

114. The method of claim 113, wherein the splice acceptor site is provided within SEQ ID NO: 2 and the splice donor site is provided within SEQ ID NO: 3.

115. The method of claim 111, wherein the antisense oligomer is of formula (IV): [chemical structure]
or a pharmaceutically acceptable salt thereof, wherein:
each Nu is a nucleobase which taken together form the targeting sequence;
Z is an integer from 10 to 38;
each Y is independently selected from —O— and —NR⁴—;
each R⁴ is independently selected from H, C₁-C₆ alkyl, aralkyl, —C(NH)NH₂, —C(O)(CH₂)ₙNR⁵C(═NH)NH₂, —C(O)(CH₂)₂NHC(O)(CH₂)₅NR⁵C(NH)NH₂, and -G;
R⁵ is selected from H and C₁-C₆ alkyl;
n is an integer from 1 to 5;
T is selected from —OH and a moiety of the formula: [chemical structure]
A is selected from —OH and —N(R⁷)₂R⁸;
each R⁷ is independently selected from H and C₁-C₆ alkyl;
R⁸ is selected from an electron pair and H;
R⁶ is selected from OH, —N(R⁹)CH₂C(O)NH₂, and a moiety of the formula: [chemical structure]
R⁹ is selected from H and C₁-C₆ alkyl;
R¹⁰ is selected from -G, —C(O)R¹¹OH, acyl, trityl, 4-methoxytrityl, —C(NH)NH₂, —C(O)(CH₂)ₘNR¹²C(NH)NH₂, and —C(O)(CH₂)₂NHC(O)(CH₂)₅NR¹²C(NH)NH₂;
m is an integer from 1 to 5,
R¹¹ is of the formula —(O-alkyl)_{y}- wherein y is an integer from 3 to 10, and each of the y alkyl groups is independently selected from C₂-C₆ alkyl;
R¹² is selected from H and C₁-C₆ alkyl;
R² is selected from H, -G, acyl, trityl, 4-methoxytrityl, C₁-C₆ alkyl, —C(NH)NH₂, and —C(O)R²³;
R³ is selected from an electron pair, H, and C₁-C₆ alkyl; and
wherein the targeting sequence: (i) comprises a sequence selected from SEQ ID NOS: 16-75; (ii) is selected from SEQ ID NOS: 16-75; (iii) is a fragment of at least 10 contiguous nucleotides of a sequence selected from SEQ ID NOS: 16-75; or (iv) is a variant having at least 90% sequence identity to a sequence selected from SEQ ID NOS: 16-75.

116. The method of claim 111, wherein the antisense oligomer is administered in an amount effective to result in a peak blood concentration of at least about 200-400 nM of antisense oligomer in the subject.

117. The method of claim 111, wherein the antisense oligomer comprises a peptide conjugated to the 3′ terminal end or the 5′ terminal end of the antisense oligomer, wherein the peptide comprises a sequence selected from SEQ ID NOS: 3486-3501.

118. A combination comprising:
a dystrophin-targeted antisense oligomer comprising 17 to 40 subunits, and further comprising a targeting sequence complementary to 12 or more contiguous nucleotides in a target region comprising an exon of human dystrophin pre-mRNA;
wherein the dystrophin-targeted antisense oligomer comprises at least one subunit that is a nucleotide analog having (i) a modified internucleoside linkage, (ii) a modified sugar moiety, or (iii) a combination of the foregoing; and
a myostatin-targeted antisense oligomer comprising 12 to 40 subunits, and further comprising a targeting sequence complementary to 12 or more contiguous nucleotides comprising an exon of human myostatin pre-mRNA;
wherein the myostatin-targeted antisense oligomer comprises at least one subunit that is a nucleotide analog having (i) a modified internucleoside linkage, (ii) a modified sugar moiety, or (iii) a combination of the foregoing.

The application's sequence listing, which the Patent Office published only in electronic form, follows.

SEQUENCE LISTING (3504 sequences)

SEQ ID NO: 1 - DNA, 434 bp, Homo sapiens
agcaacttttcttttcttattcatttatagctgattttctaatgcaagtggatggaaaacccaaatgttgcttctttaaatttagctctaaaatacaatacaataaagtagtaaaggcccaactatggatatatttgagacccgtcgagactcctacaacagtgtttgtgcaaatcctgagactcatcaaacctatgaaagacggtacaaggtatactggaatccgatctctgaaacttgacatgaacccaggcactggtatttggcagagcattgatgtgaagacagtgttgcaaaattggctcaaacaacctgaatccaacttaggcattgaaataaaagctttagatgagaatggtcatgatcttgctgtaaccttcccaggaccaggagaagatgggctggtaagtgataactgaaaataacattataat

SEQ ID NO: 2 - DNA, 50 bp, Homo sapiens
cttttcttttcttattcatttatagctgattttctaatgcaagtggatgg

SEQ ID NO: 3 - DNA, 60 bp, homo sapiens
accttcccaggaccaggagaagatgggctggtaagtgataactgaaaataacattataat

SEQ ID NO: 4 - DNA, 119 bp, Homo sapiens
gccagacctatttgactggaatagtgtggtttgccagcagtcagccacacaacgactggaacatgcattcaacatcgccagatatcaattaggcatagagaaactactcgatcctgaag

SEQ ID NO: 5 - DNA, 182 bp, Homo sapiens
atgttgataccacctatccagataagaagtccatcttaatgtacatcacatcactcttccaagttttgcctcaacaagtgagcattgaagccatccaggaagtggaaatgttgccaaggccacctaaagtgactaaagaagaacattttcagttacatcatcaaatgcactattctcaacag

SEQ ID NO: 6 - DNA, 129 bp, Homo sapiens
atcacggtcagtctagcacagggatatgagagaacttcttcccctaagcctcgattcaagagctatgcctacacacaggctgcttatgtcaccacctctgaccctacacggagcccatttccttcacag

SEQ ID NO: 7 - DNA, 88 bp, Homo sapiens
gccatagagcgagaaaaagctgagaagttcagaaaactgcaagatgccagcagatcagctcaggccctggtggaacagatggtgaatg

SEQ ID NO: 8 - DNA, 213 bp, Homo sapiens
gctttacaaagttctctgcaagagcaacaaagtggcctatactatctcagcaccactgtgaaagagatgtcgaagaaagcgccctctgaaattagccggaaatatcaatcagaatttgaagaaattgagggacgctggaagaagctctcctcccagctggttgagcattgtcaaaagctagaggagcaaatgaataaactccgaaaaattcag

SEQ ID NO: 9 - DNA, 148 bp, Homo sapiens
gcgatttgacagatctgttgagaaatggcggcgttttcattatgatataaagatatttaatcagtggctaacagaagctgaacagtttctcagaaagacacaaattcctgagaattgggaacatgctaaatacaaatggtatcttaag

SEQ ID NO: 10 - DNA, 176 bp, Homo sapiens
gaactccaggatggcattgggcagcggcaaactgttgtcagaacattgaatgcaactggggaagaaataattcagcaatcctcaaaaacagatgccagtattctacaggaaaaattgggaagcctgaatctgcggtggcaggaggtctgcaaacagctgtcagacagaaaaaagag

SEQ ID NO: 11 - DNA, 109 bp, Homo sapiens
aggaagttagaagatctgagctctgagtggaaggcggtaaaccgtttacttcaagagctgagggcaaagcagcctgacctagctcctggactgaccactattggagcct

SEQ ID NO: 12 - DNA, 233 bp, Homo sapiens
ctcctactcagactgttactctggtgacacaacctgtggttactaaggaaactgccatctccaaactagaaatgccatcttccttgatgttggaggtacctgctctggcagatttcaaccgggcttggacagaacttaccgactggctttctctgcttgatcaagttataaaatcacagagggtgatggtgggtgaccttgaggatatcaacgagatgatcatcaagcagaag

SEQ ID NO: 13 - DNA, 118 bp, Homo sapiens
gcaacaatgcaggatttggaacagaggcgtccccagttggaagaactcattaccgctgcccaaaatttgaaaaacaagaccagcaatcaagaggctagaacaatcattacggatcgaa

SEQ ID NO: 14 - DNA, 212 bp, Homo sapiens
ttgaaagaattcagaatcagtgggatgaagtacaagaacaccttcagaaccggaggcaacagttgaatgaaatgttaaaggattcaacacaatggctggaagctaaggaagaagctgagcaggtcttaggacaggccagagccaagcttgagtcatggaaggagggtccctatacagtagatgcaatccaaaagaaaatcacagaaaccaag

SEQ ID NO: 15 - DNA, 190 bp, Homo sapiens
ggtgagtgagcgagaggctgctttggaagaaactcatagattactgcaacagttccccctggacctggaaaagtttcttgcctggcttacagaagctgaaacaactgccaatgtcctacaggatgctacccgtaaggaaaggctcctagaagactccaagggagtaaaagagctgatgaaacaatggcaa

SEQ ID NO: 16 - DNA, 30 bp, Artificial sequence
  Antisense oligomer
cagcccatcttctcctggtcctgggaaggt

SEQ ID NO: 17 - DNA, 25 bp, Artificial sequence
  Antisense oligomer
ccagcccatcttctcctggtcctgg

SEQ ID NO: 18 - DNA, 25 bp, Artificial sequence
  Antisense oligomer
cacttaccagcccatcttctcctgg

SEQ ID NO: 19 - DNA, 26 bp, Artificial sequence
  Antisense oligomer
ccatccgcttgcattagaaagtcagc

SEQ ID NO: 20 - DNA, 24 bp, Artificial sequence
  Antisense oligomer
gcattagaaaatcagctataaatg

SEQ ID NO: 21 - DNA, 22 bp, Artificial sequence
  Antisense oligomer
ccacttgcattagaaaatcagc

SEQ ID NO: 22 - DNA, 25 bp, Artificial sequence
  Antisense oligomer
cttgcattagaaaatcagctataaa

SEQ ID NO: 23 - DNA, 25 bp, Artificial sequence
  Antisense oligomer
cacttgcattagaaaatcagctata

SEQ ID NO: 24 - DNA, 25 bp, Artificial sequence
  Antisense oligomer
ccacttgcattagaaaatcagctat

SEQ ID NO: 25 - DNA, 25 bp, Artificial sequence
  Antisense oligomer
tccacttgcattagaaaatcagcta

SEQ ID NO: 26 - DNA, 25 bp, Artificial sequence
  Antisense oligomer
atccacttgcattagaaaatcagct

SEQ ID NO: 27 - DNA, 25 bp, Artificial sequence
  Antisense oligomer
catccacttgcattagaaaatcagc

SEQ ID NO: 28 - DNA, 25 bp, Artificial sequence
  Antisense oligomer
ttattttcagttatcacttaccagc

SEQ ID NO: 29 - DNA, 25 bp, Artificial sequence
  Antisense oligomer
ttttcagttatcacttaccagccca

SEQ ID NO: 30 - DNA, 25 bp, Artificial sequence
  Antisense oligomer
tcagttatcacttaccagcccatct

SEQ ID NO: 31 - DNA, 25 bp, Artificial sequence
  Antisense oligomer
gttatcacttaccagcccatcttct

SEQ ID NO: 32 - DNA, 25 bp, Artificial sequence
  Antisense oligomer
atcacttaccagcccatcttctcct

SEQ ID NO: 33 - DNA, 25 bp, Artificial sequence
  Antisense oligomer
acttaccagcccatcttctcctggt

SEQ ID NO: 34 - DNA, 25 bp, Artificial sequence
  Antisense oligomer
taccagcccatcttctcctggtcct

SEQ ID NO: 35 - DNA, 25 bp, Artificial sequence
  Antisense oligomer
atgttattttcagttatcacttacc

SEQ ID NO: 36 - DNA, 25 bp, Artificial sequence
  Antisense oligomer
tgttattttcagttatcacttacca

SEQ ID NO: 37 - DNA, 25 bp, Artificial sequence
  Antisense oligomer
gttattttcagttatcacttaccag

SEQ ID NO: 38 - DNA, 25 bp, Artificial sequence
  Antisense oligomer
tattttcagttatcacttaccagcc

SEQ ID NO: 39 - DNA, 25 bp, Artificial sequence
  Antisense oligomer
attttcagttatcacttaccagccc

SEQ ID NO: 40 - DNA, 25 bp, Artificial sequence
  Antisense oligomer
tttcagttatcacttaccagcccat

SEQ ID NO: 41 - DNA, 25 bp, Artificial sequence
  Antisense oligomer
ttcagttatcacttaccagcccatc

SEQ ID NO: 42 - DNA, 25 bp, Artificial sequence
  Antisense oligomer
cagttatcacttaccagcccatctt

SEQ ID NO: 43 - DNA, 25 bp, Artificial sequence
  Antisense oligomer
agttatcacttaccagcccatcttc

SEQ ID NO: 44 - DNA, 30 bp, Artificial sequence; identical to SEQ ID NO: 16
  Antisense oligomer

SEQ ID NO: 45 - DNA, 20 bp, Artificial sequence
  Antisense oligomer
cagcccatcttctcctggtc

SEQ ID NO: 46 - DNA, 20 bp, Artificial sequence
  Antisense oligomer
tctcctggtcctgggaaggt

SEQ ID NO: 47 - DNA, 20 bp, Artificial sequence
  Antisense oligomer
ctgggaaggttacagcaaga

SEQ ID NO: 48 - DNA, 18 bp, Artificial sequence
  Antisense oligomer
cagcccatcttctcctgg

SEQ ID NO: 49 - DNA, 23 bp, Artificial sequence
  Antisense oligomer
gcccatcttctcctggtcctggg

SEQ ID NO: 50 - DNA, 25 bp, Artificial sequence
  Antisense oligomer
tttaaagaagcaacatttgggtttt

SEQ ID NO: 51 - DNA, 25 bp, Artificial sequence
  Antisense oligomer
tattttagagctaaatttaaagaag

SEQ ID NO: 52 - DNA, 25 bp, Artificial sequence
  Antisense oligomer
tactttattgtattgtattttagag

SEQ ID NO: 53 - DNA, 25 bp, Artificial sequence
  Antisense oligomer
tagttgggcctttactactttattg

SEQ ID NO: 54 - DNA, 25 bp, Artificial sequence
  Antisense oligomer
tctcaaatatatccatagttgggcc

SEQ ID NO: 55 - DNA, 25 bp, Artificial sequence
  Antisense oligomer
acgggtctcaaatatatccatagtt

SEQ ID NO: 56 - DNA, 30 bp, Artificial sequence
  Antisense oligomer
gttgtaggagtctcgacgggtctcaaatat

SEQ ID NO: 57 - DNA, 25 bp, Artificial sequence
  Antisense oligomer
acactgttgtaggagtctcgacggg

SEQ ID NO: 58 - DNA, 25 bp, Artificial sequence
  Antisense oligomer
taggtttgatgagtctcaggatttg

SEQ ID NO: 59 - DNA, 25 bp, Artificial sequence
  Antisense oligomer
ccgtctttcataggtttgatgagtc

SEQ ID NO: 60 - DNA, 30 bp, Artificial sequence
  Antisense oligomer
cagtataccttgtaccgtctttcataggtt

SEQ ID NO: 61 - DNA, 25 bp, Artificial sequence
  Antisense oligomer
gggttcatgtcaagtttcagagatc

SEQ ID NO: 62 - DNA, 30 bp, Artificial sequence
  Antisense oligomer
aataccagtgcctgggttcatgtcaagttt

SEQ ID NO: 63 - DNA, 25 bp, Artificial sequence
  Antisense oligomer
aaataccagtgcctgggttcatgtc

SEQ ID NO: 64 - DNA, 25 bp, Artificial sequence
  Antisense oligomer
tctgccaaataccagtgcctgggtt

SEQ ID NO: 65 - DNA, 25 bp, Artificial sequence
  Antisense oligomer
tcttcacatcaatgctctgccaaat

SEQ ID NO: 66 - DNA, 25 bp, Artificial sequence
  Antisense oligomer
caggttgtttgagccaattttgcaa

SEQ ID NO: 67 - DNA, 25 bp, Artificial sequence
  Antisense oligomer
tgcctaagttggattcaggttgttt

SEQ ID NO: 68 - DNA, 25 bp, Artificial sequence
  Antisense oligomer
aagcttttatttcaatgcctaagtt

SEQ ID NO: 69 - DNA, 25 bp, Artificial sequence
  Antisense oligomer
gaccattctcatctaaagcttttat

SEQ ID NO: 70 - DNA, 25 bp, Artificial sequence
  Antisense oligomer
ttacagcaagatcatgaccattctc

SEQ ID NO: 71 - DNA, 25 bp, Artificial sequence
  Antisense oligomer
  misc_feature (1)..(7): each n is independently C or 5-methylcytosine
  misc_feature (5)..(7): each n is independently C or 5-methylcytosine
  misc_feature (9)..(9): each n is independently u or t
  misc_feature (10)..(10): each n is independently C or 5-methylcytosine
  misc_feature (11)..(12): each n is independently u or t
  misc_feature (13)..(13): each n is independently C or 5-methylcytosine
  misc_feature (14)..(14): each n is independently u or t
  misc_feature (15)..(16): each n is independently C or 5-methylcytosine
  misc_feature (17)..(20): each n is independently u or t
  misc_feature (21)..(22): each n is independently C or 5-methylcytosine
  misc_feature (23)..(23): each n is independently u or t
nnagnnnannnnnnnnnggnnnngg

SEQ ID NO: 72 - DNA, 25 bp, Artificial sequence
  Antisense oligomer
  misc_feature (1)..(3): each n is independently C or 5-methylcytosine
  misc_feature (4)..(5): each n is independently u or t
  misc_feature (7)..(13): each n is independently C or 5-methylcytosine
  misc_feature (15)..(15): each n is independently u or t
  misc_feature (16)..(16): each n is independently C or 5-methylcytosine
  misc_feature (17)..(18): each n is independently u or t
  misc_feature (19)..(19): each n is independently C or 5-methylcytosine
  misc_feature (20)..(20): each n is independently u or t
  misc_feature (21)..(22): each n is independently C or 5-methylcytosine
  misc_feature (23)..(23): each n is independently u or t
nannnannagnnnannnnnnnnngg

SEQ ID NO: 73 - DNA, 22 bp, Artificial sequence
  Antisense oligomer
  misc_feature (1)..(4): each n is independently C or 5-methylcytosine
  misc_feature (5)..(6): each n is independently u or t
  misc_feature (8)..(8): each n is independently C or 5-methylcytosine
  misc_feature (10)..(18): each n is independently u or t
  misc_feature (19)..(22): each n is independently C or 5-methylcytosine
nnannngnannagaaaannagn

SEQ ID NO: 74 - DNA, 24 bp, Artificial sequence
  Antisense oligomer
  misc_feature (1)..(24): each n is independently C or 5-methylcytosine
gnattagaaaatnagntataaatg

SEQ ID NO: 75 - DNA, 26 bp, Artificial sequence
  Antisense oligomer
  misc_feature (1)..(26): each n is independently is C or 5-methylcytosine
nnatnngnttgnattagaaagtnagn

SEQ ID NO: 76 - DNA, 30 bp, Artificial sequence
  Antisense oligomer
ctccaacatcaaggaagatggcatttctag

SEQ ID NO: 77 - DNA, 30 bp, Artificial sequence; identical to SEQ ID NO: 76
  Antisense oligomer

SEQ ID NO: 78 - DNA, 25 bp, Artificial sequence
  Antisense oligomer
acaucaaggaagauggcauuucuag

SEQ ID NO: 79 - DNA, 30 bp, Artificial sequence
  Antisense oligomer
acaucaaggaagauggcauuucuaguuugg

SEQ ID NO: 80 - DNA, 26 bp, Artificial sequence
  Antisense oligomer
gagcaggtacctccaacatcaaggaa

SEQ ID NO: 81 - DNA, 25 bp, Artificial sequence
  Antisense oligomer
gggauccaguauacuuacaggcucc

SEQ ID NO: 82 - DNA, 25 bp, Artificial sequence
  Antisense oligomer
cttacaggctccaatagtggtcagt

SEQ ID NO: 83 - DNA, 27 bp, Artificial sequence
  Antisense oligomer
cctccggttctgaaggtgttcttgtac

SEQ ID NO: 84 - DNA, 25 bp, Artificial sequence
  Antisense oligomer
gttgcctccggttctgaaggtgttc

SEQ ID NO: 85 - DNA, 22 bp, Artificial sequence
  Antisense oligomer
caatgccatcctggagttcctg

SEQ ID NO: 86 - DNA, 24 bp, Artificial sequence
  Antisense oligomer
gauaggugguaucaacaucuguaa

SEQ ID NO: 87 - DNA, 21 bp, Artificial sequence
  Antisense oligomer
gauaggugguaucaacaucug

SEQ ID NO: 88 - DNA, 25 bp, Artificial sequence
  Antisense oligomer
gauaggugguaucaacaucuguaag

SEQ ID NO: 89 - DNA, 20 bp, Artificial sequence
  Antisense oligomer
ggugguaucaacaucuguaa

SEQ ID NO: 90 - DNA, 20 bp, Artificial sequence
  Antisense oligomer
guaucaacaucuguaagcac

SEQ ID NO: 91 - DNA, 23 bp, Artificial sequence
  Antisense oligomer
ugcauguuccagucguugugugg

SEQ ID NO: 92 - DNA, 25 bp, Artificial sequence
  Antisense oligomer
cacuauuccagucaaauaggucugg

SEQ ID NO: 93 - DNA, 25 bp, Artificial sequence
  Antisense oligomer
auuuaccaaccuucaggaucgagua

SEQ ID NO: 94 - DNA, 21 bp, Artificial sequence
  Antisense oligomer
ggccuaaaacacauacacaua

SEQ ID NO: 95 - DNA, 20 bp, Artificial sequence
  Antisense oligomer
cauuuuugaccuacaugugg

SEQ ID NO: 96 - DNA, 20 bp, Artificial sequence
  Antisense oligomer
uuugaccuacauguggaaag

SEQ ID NO: 97 - DNA, 26 bp, Artificial sequence
  Antisense oligomer
uacauuuuugaccuacauguggaaag

SEQ ID NO: 98 - DNA, 22 bp, Artificial sequence
  Antisense oligomer
auuuuugaccuacaugggaaag

SEQ ID NO: 99 - DNA, 23 bp, Artificial sequence
  Antisense oligomer
uacgaguugauugucggacccag

SEQ ID NO: 100 - DNA, 25 bp, Artificial sequence
  Antisense oligomer
guggucuccuuaccuaugacugugg

SEQ ID NO: 101 - DNA, 17 bp, Artificial sequence
  Antisense oligomer
ggucuccuuaccuauga

SEQ ID NO: 102 - DNA, 24 bp, Artificial sequence
  Antisense oligomer
ugucucaguaaucuucuuaccuau

SEQ ID NO: 103 - DNA, 24 bp, Artificial sequence
  Antisense oligomer
ucuuaccuaugacuauggaugaga

SEQ ID NO: 104 - DNA, 20 bp, Artificial sequence
  Antisense oligomer
gcaugaacucuuguggaucc

SEQ ID NO: 105 - DNA, 20 bp, Artificial sequence
  Antisense oligomer
ccaggguacuacuuacauua

SEQ ID NO: 106 - DNA, 21 bp, Artificial sequence
  Antisense oligomer
aucgugugucacagcauccag

SEQ ID NO: 107 - DNA, 30 bp, Artificial sequence
  Antisense oligomer
uguucagggcaugaacucuuguggauccuu

SEQ ID NO: 108 - DNA, 31 bp, Artificial sequence
  Antisense oligomer
uaggaggcgccucccauccuguaggucacug

SEQ ID NO: 109 - DNA, 31 bp, Artificial sequence
  Antisense oligomer
aggucuaggaggcgccucccauccuguaggu

SEQ ID NO: 110 - DNA, 25 bp, Artificial sequence
  Antisense oligomer
gcgccucccauccuguaggucacug

SEQ ID NO: 111 - DNA, 26 bp, Artificial sequence
  Antisense oligomer
cuucgaggaggucuaggaggcgccuc

SEQ ID NO: 112 - DNA, 21 bp, Artificial sequence
  Antisense oligomer
cucccauccuguaggucacug

SEQ ID NO: 113 - DNA, 22 bp, Artificial sequence
  Antisense oligomer
uaccaguuuuugcccugucagg

SEQ ID NO: 114 - DNA, 26 bp, Artificial sequence
  Antisense oligomer
ucaauaugcugcuucccaaacugaaa

SEQ ID NO: 115 - DNA, 25 bp, Artificial sequence
  Antisense oligomer
cuaggaggcgccucccauccuguag

SEQ ID NO: 116 - DNA, 31 bp, Artificial sequence
  Antisense oligomer
uuaugauuuccaucuacgaugucaguacuuc

SEQ ID NO: 117 - DNA, 31 bp, Artificial sequence
  Antisense oligomer
cuuaccugccaguggaggauuauauuccaaa

SEQ ID NO: 118 - DNA, 25 bp, Artificial sequence
  Antisense oligomer
caucaggauucuuaccugccagugg

SEQ ID NO: 119 - DNA, 25 bp, Artificial sequence
  Antisense oligomer
cgaugucaguacuuccaauauucac

SEQ ID NO: 120 - DNA, 18 bp, Artificial sequence
  Antisense oligomer
accauucaucaggauucu

SEQ ID NO: 121 - DNA, 18 bp, Artificial sequence
  Antisense oligomer
accugccaguggaggauu

SEQ ID NO: 122 - DNA, 27 bp, Artificial sequence
  Antisense oligomer
ccaauauucacuaaaucaaccuguuaa

SEQ ID NO: 123 - DNA, 30 bp, Artificial sequence
  Antisense oligomer
caggauuguuaccugccaguggaggauuau

SEQ ID NO: 124 - DNA, 31 bp, Artificial sequence
  Antisense oligomer
acgaugucaguacuuccaauauucacuaaau

SEQ ID NO: 125 - DNA, 31 bp, Artificial sequence
  Antisense oligomer
auuuccaucuacgaugucaguacuuccaaua

SEQ ID NO: 126 - DNA, 21 bp, Artificial sequence
  Antisense oligomer
caggagcuuccaaaugcugca

SEQ ID NO: 127 - DNA, 29 bp, Artificial sequence
  Antisense oligomer
cuugucuucaggagcuuccaaaugcugca

SEQ ID NO: 128 - DNA, 22 bp, Artificial sequence
  Antisense oligomer
uccucagcagaaagaagccacg

SEQ ID NO: 129 - DNA, 20 bp, Artificial sequence
  Antisense oligomer
uuagaaaucucuccuugugc

SEQ ID NO: 130 - DNA, 20 bp, Artificial sequence
  Antisense oligomer
uaaauuggguguuacacaau

SEQ ID NO: 131 - DNA, 24 bp, Artificial sequence
  Antisense oligomer
cccugaggcauucccaucuugaau

SEQ ID NO: 132 - DNA, 20 bp, Artificial sequence
  Antisense oligomer
aggacuuacuugcuuuguuu

SEQ ID NO: 133 - DNA, 23 bp, Artificial sequence
  Antisense oligomer
cuugaauuuaggagauucaucug

SEQ ID NO: 134 - DNA, 23 bp, Artificial sequence
  Antisense oligomer
caucuucugauaauuuuccuguu

SEQ ID NO: 135 - DNA, 24 bp, Artificial sequence
  Antisense oligomer
ucuucuguuuuuguuagccaguca

SEQ ID NO: 136 - DNA, 20 bp, Artificial sequence
  Antisense oligomer
ucuauguaaacugaaaauuu

SEQ ID NO: 137 - DNA, 20 bp, Artificial sequence
  Antisense oligomer
uucuggagauccauuaaaac

SEQ ID NO: 138 - DNA, 24 bp, Artificial sequence
  Antisense oligomer
cagcaguugcgugaucuccacuag

SEQ ID NO: 139 - DNA, 21 bp, Artificial sequence
  Antisense oligomer
uucaucaacuaccaccaccau

SEQ ID NO: 140 - DNA, 25 bp, Artificial sequence
  Antisense oligomer
cuaagcaaaauaaucugaccuuaag

SEQ ID NO: 141 - DNA, 28 bp, Artificial sequence
  Antisense oligomer
cuuguaaaagaacccagcggucuucugu

SEQ ID NO: 142 - DNA, 22 bp, Artificial sequence
  Antisense oligomer
caucuacagauguuugcccauc

SEQ ID NO: 143 - DNA, 23 bp, Artificial sequence
  Antisense oligomer
gaaggaugucuuguaaaagaacc

SEQ ID NO: 144 - DNA, 20 bp, Artificial sequence
  Antisense oligomer
accuguucuucaguaagacg

SEQ ID NO: 145 - DNA, 24 bp, Artificial sequence
  Antisense oligomer
caugacacaccuguucuucaguaa

SEQ ID NO: 146 - DNA, 20 bp, Artificial sequence
  Antisense oligomer
cauuugagaaggaugucuug

SEQ ID NO: 147 - DNA, 24 bp, Artificial sequence
  Antisense oligomer
aucucccaauaccuggagaagaga

SEQ ID NO: 148 - DNA, 31 bp, Artificial sequence
  Antisense oligomer
gccaugcacuaaaaaggcacugcaagacauu

SEQ ID NO: 149 - DNA, 24 bp, Artificial sequence
  Antisense oligomer
ucuuuaaagccaguugugugaauc

SEQ ID NO: 150 - DNA, 21 bp, Artificial sequence
  Antisense oligomer
uuucugaaagccaugcacuaa

SEQ ID NO: 151 - DNA, 25 bp, Artificial sequence
  Antisense oligomer
guacauacggccaguuuuugaagac

SEQ ID NO: 152 - DNA, 31 bp, Artificial sequence
  Antisense oligomer
cuagauccgcuuuuaaaaccuguuaaaacaa

SEQ ID NO: 153 - DNA, 31 bp, Artificial sequence
  Antisense oligomer
ucuuuucuagauccgcuuuuaaaaccuguua

SEQ ID NO: 154 - DNA, 25 bp, Artificial sequence
  Antisense oligomer
cuagauccgcuuuuaaaaccuguua

SEQ ID NO: 155 - DNA, 23 bp, Artificial sequence
  Antisense oligomer
ccgucuucugggucacugacuua

SEQ ID NO: 156 - DNA, 26 bp, Artificial sequence
  Antisense oligomer
cuagauccgcuuuuaaaaccuguuaa

SEQ ID NO: 157 - DNA, 20 bp, Artificial sequence
  Antisense oligomer
ccgcuuuuaaaaccuguuaa

SEQ ID NO: 158 - DNA, 26 bp, Artificial sequence
  Antisense oligomer
uggauugcuuuuucuuuucuagaucc

SEQ ID NO: 159 - DNA, 25 bp, Artificial sequence
  Antisense oligomer
caugcuuccgucuucugggucacug

SEQ ID NO: 160 - DNA, 23 bp, Artificial sequence
  Antisense oligomer
gaucuuguuugagugaauacagu

SEQ ID NO: 161 - DNA, 22 bp, Artificial sequence
  Antisense oligomer
guuauccagccaugcuuccguc

SEQ ID NO: 162 - DNA, 25 bp, Artificial sequence
  Antisense oligomer
ugauaauugguaucacuaaccugug

SEQ ID NO: 163 - DNA, 22 bp, Artificial sequence
  Antisense oligomer
guaucacuaaccugugcuguac

SEQ ID NO: 164 - DNA, 19 bp, Artificial sequence
  Antisense oligomer
cugcuggcaucuugcaguu

SEQ ID NO: 165 - DNA, 31 bp, Artificial sequence
  Antisense oligomer
gccugagcugaucugcuggcaucuugcaguu

SEQ ID NO: 166 - DNA, 28 bp, Artificial sequence
  Antisense oligomer
cuggcagaauucgauccaccggcuguuc

SEQ ID NO: 167 - DNA, 22 bp, Artificial sequence
  Antisense oligomer
cagcaguaguugucaucugcuc

SEQ ID NO: 168 - DNA, 19 bp, Artificial sequence
  Antisense oligomer
ugauggggugguggguugg

SEQ ID NO: 169 - DNA, 25 bp, Artificial sequence
  Antisense oligomer
aucugcauuaacacccucuagaaag

SEQ ID NO: 170 - DNA, 24 bp, Artificial sequence
  Antisense oligomer
ccggcuguucaguuguucugaggc

SEQ ID NO: 171 - DNA, 28 bp, Artificial sequence
  Antisense oligomer
aucugcauuaacacccucuagaaagaaa

SEQ ID NO: 172 - DNA, 28 bp, Artificial sequence
  Antisense oligomer
gaaggagaagagauucuuaccuuacaaa

SEQ ID NO: 173 - DNA, 20 bp, Artificial sequence
  Antisense oligomer
auucgauccaccggcuguuc

SEQ ID NO: 174 - DNA, 20 bp, Artificial sequence
  Antisense oligomer
cagcaguaguugucaucugc

SEQ ID NO: 175 - DNA, 22 bp, Artificial sequence
  Antisense oligomer
gccgguugacuucauccugugc

SEQ ID NO: 176 - DNA, 22 bp, Artificial sequence
  Antisense oligomer
cugcauccaggaacaugggucc

SEQ ID NO: 177 - DNA, 23 bp, Artificial sequence
  Antisense oligomer
gucugcauccaggaacauggguc

SEQ ID NO: 178 - DNA, 24 bp, Artificial sequence
  Antisense oligomer
guugaagaucugauagccgguuga

SEQ ID NO: 179 - DNA, 24 bp, Artificial sequence
  Antisense oligomer
uacuuacugucuguagcucuuucu

SEQ ID NO: 180 - DNA, 24 bp, Artificial sequence
  Antisense oligomer
cacucauggucuccugauagcgca

SEQ ID NO: 181 - DNA, 22 bp, Artificial sequence
  Antisense oligomer
cugcaauuccccgagucucugc

SEQ ID NO: 182 - DNA, 23 bp, Artificial sequence
  Antisense oligomer
acugcuggacccauguccugaug

SEQ ID NO: 183 - DNA, 21 bp, Artificial sequence
  Antisense oligomer
cuaaguugagguauggagagu

SEQ ID NO: 184 - DNA, 23 bp, Artificial sequence
  Antisense oligomer
uauucacagaccugcaauucccc

SEQ ID NO: 185 - DNA, 26 bp, Artificial sequence
  Antisense oligomer
acaguggugcugagauaguauaggcc

SEQ ID NO: 186 - DNA, 22 bp, Artificial sequence
  Antisense oligomer
uaggccacuuuguugcucuugc

SEQ ID NO: 187 - DNA, 19 bp, Artificial sequence
  Antisense oligomer
uucagagggcgcuuucuuc

SEQ ID NO: 188 - DNA, 23 bp, Artificial sequence
  Antisense oligomer
gggcaggccauuccuccuucaga

SEQ ID NO: 189 - DNA, 24 bp, Artificial sequence
  Antisense oligomer
ucuucaggguuuguaugugauucu

SEQ ID NO: 190 - DNA, 27 bp, Artificial sequence
  Antisense oligomer
cugggcugaauugucugaauaucacug

SEQ ID NO: 191 - DNA, 26 bp, Artificial sequence
  Antisense oligomer
cuguuggcacaugugaucccacugag

SEQ ID NO: 192 - DNA, 24 bp, Artificial sequence
  Antisense oligomer
gucuauaccuguuggcacauguga

SEQ ID NO: 193 - DNA, 25 bp, Artificial sequence
  Antisense oligomer
ugcuuucuguaauucaucuggaguu

SEQ ID NO: 194 - DNA, 26 bp, Artificial sequence
  Antisense oligomer
ccuccuuucuggcauagaccuuccac

SEQ ID NO: 195 - DNA, 25 bp, Artificial sequence
  Antisense oligomer
ugugucauccauucgugcaucucug

SEQ ID NO: 196 - DNA, 25 bp, Artificial sequence
  Antisense oligomer
uuaaggccucuugugcuacaggugg

SEQ ID NO: 197 - DNA, 23 bp, Artificial sequence
  Antisense oligomer
ggggcucuucuuuagcucucuga

SEQ ID NO: 198 - DNA, 22 bp, Artificial sequence
  Antisense oligomer
gacuuccaaagucuugcauuuc

SEQ ID NO: 199 - DNA, 24 bp, Artificial sequence
  Antisense oligomer
gccaacaugcccaaacuuccuaag

SEQ ID NO: 200 - DNA, 26 bp, Artificial sequence
  Antisense oligomer
cagagauuuccucagcuccgccagga

SEQ ID NO: 201 - DNA, 21 bp, Artificial sequence
  Antisense oligomer
cuuacaucuagcaccucagag

SEQ ID NO: 202 - DNA, 25 bp, Artificial sequence
  Antisense oligomer
uccgccaucuguuagggucugugcc

SEQ ID NO: 203 - DNA, 25 bp, Artificial sequence
  Antisense oligomer
auuuggguuauccucugaaugucgc

SEQ ID NO: 204 - DNA, 22 bp, Artificial sequence
  Antisense oligomer
cauaccucuucauguaguuccc

SEQ ID NO: 205 - DNA, 26 bp, Artificial sequence
  Antisense oligomer
cauuugagcugcguccaccuugucug

SEQ ID NO: 206 - DNA, 26 bp, Artificial sequence
  Antisense oligomer
uccugggcagacuggaugcucuguuc

SEQ ID NO: 207 - DNA, 23 bp, Artificial sequence
  Antisense oligomer
uugccugggcuuccugaggcauu

SEQ ID NO: 208 - DNA, 24 bp, Artificial sequence
  Antisense oligomer
uucugaaauaacauauaccugugc

SEQ ID NO: 209 - DNA, 25 bp, Artificial sequence
  Antisense oligomer
uaguuucugaaauaacauauaccug

SEQ ID NO: 210 - DNA, 21 bp, Artificial sequence
  Antisense oligomer
gacuugucaaaucagauugga

SEQ ID NO: 211 - DNA, 24 bp, Artificial sequence
  Antisense oligomer
guuucugaaauaacauauaccugu

SEQ ID NO: 212 - DNA, 20 bp, Artificial sequence
  Antisense oligomer
caccagaaauacauaccaca

SEQ ID NO: 213 - DNA, 20 bp, Artificial sequence
  Antisense oligomer
caaugauuuagcugugacug

SEQ ID NO: 214 - DNA, 23 bp, Artificial sequence
  Antisense oligomer
cgaaacuucauggagacaucuug

SEQ ID NO: 215 - DNA, 25 bp, Artificial sequence
  Antisense oligomer
cuuguagacgcugcucaaaauuggc

SEQ ID NO: 216 - DNA, 20 bp, Artificial sequence
  Antisense oligomer
caugcacacaccuuugcucc

SEQ ID NO: 217 - DNA, 24 bp, Artificial sequence
  Antisense oligomer
ucuguacaaucugacguccagucu

SEQ ID NO: 218 - DNA, 27 bp, Artificial sequence
  Antisense oligomer
gucuuuaucaccauuuccacuucagac

SEQ ID NO: 219 - DNA, 25 bp, Artificial sequence
  Antisense oligomer
ccgucugcuuuuucuguacaaucug

SEQ ID NO: 220 - DNA, 22 bp, Artificial sequence
  Antisense oligomer
uccauaucuguagcugccagcc

SEQ ID NO: 221 - DNA, 23 bp, Artificial sequence
  Antisense oligomer
ccaggcaacuucagaauccaaau

SEQ ID NO: 222 - DNA, 30 bp, Artificial sequence
  Antisense oligomer
uuucuguuaccugaaaagaauuauaaugaa

SEQ ID NO: 223 - DNA, 25 bp, Artificial sequence
  Antisense oligomer
cauucauuuccuuucgcaucuuacg

SEQ ID NO: 224 - DNA, 26 bp, Artificial sequence
  Antisense oligomer
ugaucucuuugucaauuccauaucug

SEQ ID NO: 225 - DNA, 30 bp, Artificial sequence
  Antisense oligomer
uucagugauauagguuuuaccuuuccccag

SEQ ID NO: 226 - DNA, 26 bp, Artificial sequence
  Antisense oligomer
cuguagcugccagccauucugucaag

SEQ ID NO: 227 - DNA, 21 bp, Artificial sequence
  Antisense oligomer
ucuucugcucgggaggugaca

SEQ ID NO: 228 - DNA, 20 bp, Artificial sequence
  Antisense oligomer
ccaguuacuauucagaagac

SEQ ID NO: 229 - DNA, 20 bp, Artificial sequence
  Antisense oligomer
ucuucaggugcaccuucugu

SEQ ID NO: 230 - DNA, 25 bp, Artificial sequence
  Antisense oligomer
ugugaugugguccacauucugguca

SEQ ID NO: 231 - DNA, 20 bp, Artificial sequence
  Antisense oligomer
ccauguguuucugguauucc

SEQ ID NO: 232 - DNA, 25 bp, Artificial sequence
  Antisense oligomer
cguguagaguccaccuuugggcgua

SEQ ID NO: 233 - DNA, 24 bp, Artificial sequence
  Antisense oligomer
uacuaauuuccugcaguggucacc

SEQ ID NO: 234 - DNA, 24 bp, Artificial sequence
  Antisense oligomer
uucugugugaaauggcugcaaauc

SEQ ID NO: 235 - DNA, 20 bp, Artificial sequence
  Antisense oligomer
ccuucaaaggaauggaggcc

SEQ ID NO: 236 - DNA, 25 bp, Artificial sequence
  Antisense oligomer
ugcugaauuucagccuccagugguu

SEQ ID NO: 237 - DNA, 25 bp, Artificial sequence
  Antisense oligomer
ugaagucuuccucuuucagauucac

SEQ ID NO: 238 - DNA, 24 bp, Artificial sequence
  Antisense oligomer
cuggcuuucucucaucugugauuc

SEQ ID NO: 239 - DNA, 20 bp, Artificial sequence
  Antisense oligomer
guuguaaguugucuccucuu

SEQ ID NO: 240 - DNA, 20 bp, Artificial sequence
  Antisense oligomer
uugucuguaacagcugcugu

SEQ ID NO: 241 - DNA, 20 bp, Artificial sequence
  Antisense oligomer
gcucuaauaccuugagagca

SEQ ID NO: 242 - DNA, 22 bp, Artificial sequence
  Antisense oligomer
cuuugagaccucaaauccuguu

SEQ ID NO: 243 - DNA, 25 bp, Artificial sequence
  Antisense oligomer
cuuuauuuuccuuucaucucugggc

SEQ ID NO: 244 - DNA, 27 bp, Artificial sequence
  Antisense oligomer
aucguuucuucacggacagugugcugg

SEQ ID NO: 245 - DNA, 24 bp, Artificial sequence
  Antisense oligomer
gggcuugugagacaugagugauuu

SEQ ID NO: 246 - DNA, 22 bp, Artificial sequence
  Antisense oligomer
accuucagaggacuccucuugc

SEQ ID NO: 247 - DNA, 25 bp, Artificial sequence
  Antisense oligomer
uauguguuaccuacccuugucgguc

SEQ ID NO: 248 - DNA, 20 bp, Artificial sequence
  Antisense oligomer
ggagagagcuuccuguagcu

SEQ ID NO: 249 - DNA, 23 bp, Artificial sequence
  Antisense oligomer
ucacccuuuccacaggcguugca

SEQ ID NO: 250 - DNA, 20 bp, Artificial sequence
  Antisense oligomer
uuugugucuuucugagaaac

SEQ ID NO: 251 - DNA, 20 bp, Artificial sequence
  Antisense oligomer
aaagacuuaccuuaagauac

SEQ ID NO: 252 - DNA, 20 bp, Artificial sequence
  Antisense oligomer
aucugucaaaucgccugcag

SEQ ID NO: 253 - DNA, 20 bp, Artificial sequence
  Antisense oligomer
uuaccuugacuugcucaagc

SEQ ID NO: 254 - DNA, 20 bp, Artificial sequence
  Antisense oligomer
uccagguucaagugggauac

SEQ ID NO: 255 - DNA, 25 bp, Artificial sequence
  Antisense oligomer
gcucuucugggcuuaugggagcacu

SEQ ID NO: 256 - DNA, 27 bp, Artificial sequence
  Antisense oligomer
accuuuauccacuggagauuugucugc

SEQ ID NO: 257 - DNA, 21 bp, Artificial sequence
  Antisense oligomer
uuccaccaguaacugaaacag

SEQ ID NO: 258 - DNA, 29 bp, Artificial sequence
  Antisense oligomer
ccacucagagcucagaucuucuaacuucc

SEQ ID NO: 259 - DNA, 27 bp, Artificial sequence
  Antisense oligomer
cuuccacucagagcucagaucuucuaa

SEQ ID NO: 260 - DNA, 26 bp, Artificial sequence
  Antisense oligomer
accagaguaacagucugaguaggagc

SEQ ID NO: 261 - DNA, 23 bp, Artificial sequence
  Antisense oligomer
cucauaccuucugcuugaugauc

SEQ ID NO: 262 - DNA, 24 bp, Artificial sequence
  Antisense oligomer
uucuguccaagcccgguugaaauc

SEQ ID NO: 263 - DNA, 30 bp, Artificial sequence
  Antisense oligomer
cuccaacaucaaggaagauggcauuucuag

SEQ ID NO: 264 - DNA, 25 bp, Artificial sequence
  Antisense oligomer
aucauuuuuucucauaccuucugcu

SEQ ID NO: 265 - DNA, 36 bp, Artificial sequence
  Antisense oligomer
aucauuuuuucucauaccuucugcuaggagcuaaaa

SEQ ID NO: 266 - DNA, 21 bp, Artificial sequence
  Antisense oligomer
cacccaccaucacccucugug

SEQ ID NO: 267 - DNA, 22 bp, Artificial sequence
  Antisense oligomer
aucaucucguugauauccucaa

SEQ ID NO: 268 - DNA, 21 bp, Artificial sequence
  Antisense oligomer
uccugcauuguugccuguaag

SEQ ID NO: 269 - DNA, 30 bp, Artificial sequence
  Antisense oligomer
uccaacuggggacgccucuguuccaaaucc

SEQ ID NO: 270 - DNA, 21 bp, Artificial sequence
  Antisense oligomer
acuggggacgccucuguucca

SEQ ID NO: 271 - DNA, 20 bp, Artificial sequence
  Antisense oligomer
ccguaaugauuguucuagcc

SEQ ID NO: 272 - DNA, 20 bp, Artificial sequence
  Antisense oligomer
uguuaaaaaacuuacuucga

SEQ ID NO: 273 - DNA, 25 bp, Artificial sequence
  Antisense oligomer
cauucaacuguugccuccgguucug

SEQ ID NO: 274 - DNA, 24 bp, Artificial sequence
  Antisense oligomer
cuguugccuccgguucugaaggug

SEQ ID NO: 275 - DNA, 31 bp, Artificial sequence
  Antisense oligomer
cauucaacuguugccuccgguucugaaggug

SEQ ID NO: 276 - DNA, 21 bp, Artificial sequence
  Antisense oligomer
uacuaaccuugguuucuguga

SEQ ID NO: 277 - DNA, 25 bp, Artificial sequence
  Antisense oligomer
cugaagguguucuuguacuucaucc

SEQ ID NO: 278 - DNA, 27 bp, Artificial sequence
  Antisense oligomer
uguauagggacccuccuuccaugacuc

SEQ ID NO: 279 - DNA, 25 bp, Artificial sequence
  Antisense oligomer
cuaaccuugguuucugugauuuucu

SEQ ID NO: 280 - DNA, 27 bp, Artificial sequence
  Antisense oligomer
gguaucuuugauacuaaccuugguuuc

SEQ ID NO: 281 - DNA, 22 bp, Artificial sequence
  Antisense oligomer
auucuuucaacuagaauaaaag

SEQ ID NO: 282 - DNA, 25 bp, Artificial sequence
  Antisense oligomer
gauucugaauucuuucaacuagaau

SEQ ID NO: 283 - DNA, 20 bp, Artificial sequence
  Antisense oligomer
aucccacugauucugaauuc

SEQ ID NO: 284 - DNA, 22 bp, Artificial sequence
  Antisense oligomer
uuggcucuggccuguccuaaga

SEQ ID NO: 285 - DNA, 30 bp, Artificial sequence
  Antisense oligomer
cucuuuuccagguucaagugggauacuagc

SEQ ID NO: 286 - DNA, 31 bp, Artificial sequence
  Antisense oligomer
caagcuuuucuuuuaguugcugcucuuuucc

SEQ ID NO: 287 - DNA, 30 bp, Artificial sequence
  Antisense oligomer
uauucuuuuguucuucuagccuggagaaag

SEQ ID NO: 288 - DNA, 28 bp, Artificial sequence
  Antisense oligomer
cugcuuccuccaaccauaaaacaaauuc

SEQ ID NO: 289 - DNA, 26 bp, Artificial sequence
  Antisense oligomer
ccaaugccauccuggaguuccuguaa

SEQ ID NO: 290 - DNA, 20 bp, Artificial sequence
  Antisense oligomer
uccuguagaauacuggcauc

SEQ ID NO: 291 - DNA, 27 bp, Artificial sequence
  Antisense oligomer
ugcagaccuccugccaccgcagauuca

SEQ ID NO: 292 - DNA, 20 bp, Artificial sequence
  Antisense oligomer
cuaccucuuuuuucugucug

SEQ ID NO: 293 - DNA, 20 bp, Artificial sequence
  Antisense oligomer
uguuuuugaggauugcugaa

SEQ ID NO: 294 - DNA, 28 bp, Artificial sequence
  Antisense oligomer
gttgcctccggttctgaaggtgttcttg

SEQ ID NO: 295 - DNA, 25 bp, Artificial sequence
  Antisense oligomer
ctgaaggtgttcttgtacttcatcc

SEQ ID NO: 296 - DNA, 30 bp, Artificial sequence
  Antisense oligomer
ctgttgcctccggttctgaaggtgttcttg

SEQ ID NO: 297 - DNA, 33 bp, Artificial sequence
  Antisense oligomer
caactgttgcctccggttctgaaggtgttcttg

SEQ ID NO: 298 - DNA, 25 bp, Artificial sequence
  Antisense oligomer
ctccggttctgaaggtgttcttgta

SEQ ID NO: 299 - DNA, 28 bp, Artificial sequence
  Antisense oligomer
atttcattcaactgttgcctccggttct

SEQ ID NO: 300 - DNA, 25 bp, Artificial sequence
  Antisense oligomer
tgaaggtgttcttgtacttcatccc

SEQ ID NO: 301 - DNA, 24 bp, Artificial sequence
  Antisense oligomer
cattcaactgttgcctccggttct

SEQ ID NO: 302 - DNA, 22 bp, Artificial sequence
  Antisense oligomer
tgttgcctccggttctgaaggt

SEQ ID NO: 303 - DNA, 25 bp, Artificial sequence
  Antisense oligomer
gttgcctccggttctgaaggtgttc

SEQ ID NO: 304 - DNA, 28 bp, Artificial sequence
  Antisense oligomer
gcctccggttctgaaggtgttcttgtac

SEQ ID NO: 305 - DNA, 27 bp, Artificial sequence
  Antisense oligomer
cctccggttctgaaggtgttcttgtac

SEQ ID NO: 306 - DNA, 26 bp, Artificial sequence
  Antisense oligomer
ctccggttctgaaggtgttcttgtac

SEQ ID NO: 307 - DNA, 25 bp, Artificial sequence
  Antisense oligomer
gcctccggttctgaaggtgttcttg

SEQ ID NO: 308 - DNA, 24 bp, Artificial sequence
  Antisense oligomer
cagatctgtcaaatcgcctgcagg

SEQ ID NO: 309 - DNA, 27 bp, Artificial sequence
  Antisense oligomer
caacagatctgtcaaatcgcctgcagg

SEQ ID NO: 310 - DNA, 29 bp, Artificial sequence
  Antisense oligomer
ctcaacagatctgtcaaatcgcctgcagg

SEQ ID NO: 311 - DNA, 25 bp, Artificial sequence
  Antisense oligomer
gtgtctttctgagaaactgttcagc

SEQ ID NO: 312 - DNA, 28 bp, Artificial sequence
  Antisense oligomer
gagaaactgttcagcttctgttagccac

SEQ ID NO: 313 - DNA, 28 bp, Artificial sequence
  Antisense oligomer
gaaactgttcagcttctgttagccactg

SEQ ID NO: 314 - DNA, 24 bp, Artificial sequence
  Antisense oligomer
ctgttcagcttctgttagccactg

SEQ ID NO: 315 - DNA, 20 bp, Artificial sequence
  Antisense oligomer
atctgtcaaatcgcctgcag

SEQ ID NO: 316 - DNA, 20 bp, Artificial sequence
  Antisense oligomer
tttgtgtctttctgagaaac

SEQ ID NO: 317 - DNA, 24 bp, Artificial sequence
  Antisense oligomer
tgttcagcttctgttagccactga

SEQ ID NO: 318 - DNA, 25 bp, Artificial sequence
  Antisense oligomer
gatctgtcaaatcgcctgcaggtaa

SEQ ID NO: 319 - DNA, 25 bp, Artificial sequence
  Antisense oligomer
aaactgttcagcttctgttagccac

SEQ ID NO: 320 - DNA, 25 bp, Artificial sequence
  Antisense oligomer
ttgtgtctttctgagaaactgttca

SEQ ID NO: 321 - DNA, 26 bp, Artificial sequence
  Antisense oligomer
caacagatctgtcaaatcgcctgcag

SEQ ID NO: 322 - DNA, 26 bp, Artificial sequence
  Antisense oligomer
cagatctgtcaaatcgcctgcaggta

SEQ ID NO: 323 - DNA, 27 bp, Artificial sequence
  Antisense oligomer
ctgttcagcttctgttagccactgatt

SEQ ID NO: 324 - DNA, 31 bp, Artificial sequence
  Antisense oligomer
gaaactgttcagcttctgttagccactgatt

SEQ ID NO: 325 - DNA, 26 bp, Artificial sequence
  Antisense oligomer
agaaactgttcagcttctgttagcca

SEQ ID NO: 326 - DNA, 25 bp, Artificial sequence
  Antisense oligomer
ctgcaggtaaaagcatatggatcaa

SEQ ID NO: 327 - DNA, 25 bp, Artificial sequence
  Antisense oligomer
atcgcctgcaggtaaaagcatatgg

SEQ ID NO: 328 - DNA, 25 bp, Artificial sequence
  Antisense oligomer
gtcaaatcgcctgcaggtaaaagca

SEQ ID NO: 329 - DNA, 25 bp, Artificial sequence
  Antisense oligomer
caacagatctgtcaaatcgcctgca

SEQ ID NO: 330 - DNA, 25 bp, Artificial sequence
  Antisense oligomer
tttctcaacagatctgtcaaatcgc

SEQ ID NO: 331 - DNA, 25 bp, Artificial sequence
  Antisense oligomer
ccatttctcaacagatctgtcaaat

SEQ ID NO: 332 - DNA, 25 bp, Artificial sequence
  Antisense oligomer
ataatgaaaacgccgccatttctca

SEQ ID NO: 333 - DNA, 25 bp, Artificial sequence
  Antisense oligomer
aaatatctttatatcataatgaaaa

SEQ ID NO: 334 - DNA, 25 bp, Artificial sequence
  Antisense oligomer
tgttagccactgattaaatatcttt

SEQ ID NO: 335 - DNA, 25 bp, Artificial sequence
  Antisense oligomer
ccaattctcaggaatttgtgtcttt

SEQ ID NO: 336 - DNA, 25 bp, Artificial sequence
  Antisense oligomer
gtatttagcatgttcccaattctca

SEQ ID NO: 337 - DNA, 25 bp, Artificial sequence
  Antisense oligomer
cttaagataccatttgtatttagca

SEQ ID NO: 338 - DNA, 25 bp, Artificial sequence
  Antisense oligomer
cttaccttaagataccatttgtatt

SEQ ID NO: 339 - DNA, 25 bp, Artificial sequence
  Antisense oligomer
aaagacttaccttaagataccattt

SEQ ID NO: 340 - DNA, 25 bp, Artificial sequence
  Antisense oligomer
aaatcaaagacttaccttaagatac

SEQ ID NO: 341 - DNA, 25 bp, Artificial sequence
  Antisense oligomer
aaaacaaatcaaagacttaccttaa

SEQ ID NO: 342 - DNA, 25 bp, Artificial sequence
  Antisense oligomer
tcgaaaaaacaaatcaaagacttac

SEQ ID NO: 343 - DNA, 25 bp, Artificial sequence
  Antisense oligomer
ctgtaagataccaaaaaggcaaaac

SEQ ID NO: 344 - DNA, 25 bp, Artificial sequence
  Antisense oligomer
cctgtaagataccaaaaaggcaaaa

SEQ ID NO: 345 - DNA, 25 bp, Artificial sequence
  Antisense oligomer
agttcctgtaagataccaaaaaggc

SEQ ID NO: 346 - DNA, 25 bp, Artificial sequence
  Antisense oligomer
gagttcctgtaagataccaaaaagg

SEQ ID NO: 347 - DNA, 25 bp, Artificial sequence
  Antisense oligomer
cctggagttcctgtaagataccaaa

SEQ ID NO: 348 - DNA, 25 bp, Artificial sequence
  Antisense oligomer
tcctggagttcctgtaagataccaa

SEQ ID NO: 349 - DNA, 25 bp, Artificial sequence
  Antisense oligomer
gccatcctggagttcctgtaagata

SEQ ID NO: 350 - DNA, 25 bp, Artificial sequence
  Antisense oligomer
tgccatcctggagttcctgtaagat

SEQ ID NO: 351 - DNA, 25 bp, Artificial sequence
  Antisense oligomer
ccaatgccatcctggagttcctgta

SEQ ID NO: 352 - DNA, 25 bp, Artificial sequence
  Antisense oligomer
cccaatgccatcctggagttcctgt

SEQ ID NO: 353 - DNA, 25 bp, Artificial sequence
  Antisense oligomer
gctgcccaatgccatcctggagttc

SEQ ID NO: 354 - DNA, 25 bp, Artificial sequence
  Antisense oligomer
cgctgcccaatgccatcctggagtt

SEQ ID NO: 355 - DNA, 25 bp, Artificial sequence
  Antisense oligomer
aacagtttgccgctgcccaatgcca

SEQ ID NO: 356 - DNA, 25 bp, Artificial sequence
  Antisense oligomer
ctgacaacagtttgccgctgcccaa

SEQ ID NO: 357 - DNA, 25 bp, Artificial sequence
  Antisense oligomer
gttgcattcaatgttctgacaacag

SEQ ID NO: 358 - DNA, 25 bp, Artificial sequence
  Antisense oligomer
gctgaattatttcttccccagttgc

SEQ ID NO: 359 - DNA, 25 bp, Artificial sequence
  Antisense oligomer
attatttcttccccagttgcattca

SEQ ID NO: 360 - DNA, 25 bp, Artificial sequence
  Antisense oligomer
ggcatctgtttttgaggattgctga

SEQ ID NO: 361 - DNA, 25 bp, Artificial sequence
  Antisense oligomer
tttgaggattgctgaattatttctt

SEQ ID NO: 362 - DNA, 25 bp, Artificial sequence
  Antisense oligomer
aatttttcctgtagaatactggcat

SEQ ID NO: 363 - DNA, 25 bp, Artificial sequence
  Antisense oligomer
atactggcatctgtttttgaggatt

SEQ ID NO: 364 - DNA, 25 bp, Artificial sequence
  Antisense oligomer
accgcagattcaggcttcccaattt

SEQ ID NO: 365 - DNA, 25 bp, Artificial sequence
  Antisense oligomer
ctgtttgcagacctcctgccaccgc

SEQ ID NO: 366 - DNA, 25 bp, Artificial sequence
  Antisense oligomer
agattcaggcttcccaatttttcct

SEQ ID NO: 367 - DNA, 25 bp, Artificial sequence
  Antisense oligomer
ctcttttttctgtctgacagctgtt

SEQ ID NO: 368 - DNA, 25 bp, Artificial sequence
  Antisense oligomer
acctcctgccaccgcagattcaggc

SEQ ID NO: 369 - DNA, 25 bp, Artificial sequence
  Antisense oligomer
cctacctcttttttctgtctgacag

SEQ ID NO: 370 - DNA, 25 bp, Artificial sequence
  Antisense oligomer
gacagctgtttgcagacctcctgcc

SEQ ID NO: 371 - DNA, 25 bp, Artificial sequence
  Antisense oligomer
gtcgccctacctcttttttctgtct

SEQ ID NO: 372 - DNA, 25 bp, Artificial sequence
  Antisense oligomer
gatctgtcgccctacctcttttttc

SEQ ID NO: 373 - DNA, 25 bp, Artificial sequence
  Antisense oligomer
tattagatctgtcgccctacctctt

SEQ ID NO: 374 - DNA, 25 bp, Artificial sequence
  Antisense oligomer
attcctattagatctgtcgccctac

SEQ ID NO: 375 - DNA, 20 bp, Artificial sequence
  Antisense oligomer
agataccaaaaaggcaaaac

SEQ ID NO: 376 - DNA, 20 bp, Artificial sequence
  Antisense oligomer
aagataccaaaaaggcaaaa

SEQ ID NO: 377 - DNA, 20 bp, Artificial sequence
  Antisense oligomer
cctgtaagataccaaaaagg

SEQ ID NO: 378 - DNA, 20 bp, Artificial sequence
  Antisense oligomer
gagttcctgtaagataccaa

SEQ ID NO: 379 - DNA, 20 bp, Artificial sequence
  Antisense oligomer
tcctggagttcctgtaagat

SEQ ID NO: 380 - DNA, 20 bp, Artificial sequence
  Antisense oligomer
tgccatcctggagttcctgt

SEQ ID NO: 381 - DNA, 20 bp, Artificial sequence
  Antisense oligomer
cccaatgccatcctggagtt

SEQ ID NO: 382 - DNA, 20 bp, Artificial sequence
  Antisense oligomer
cgctgcccaatgccatcctg

SEQ ID NO: 383 - DNA, 20 bp, Artificial sequence
  Antisense oligomer
ctgacaacagtttgccgctg

SEQ ID NO: 384 - DNA, 20 bp, Artificial sequence
  Antisense oligomer
gttgcattcaatgttctgac

SEQ ID NO: 385 - DNA, 20 bp, Artificial sequence
  Antisense oligomer
attatttcttccccagttgc

SEQ ID NO: 386 - DNA, 20 bp, Artificial sequence
  Antisense oligomer
tttgaggattgctgaattat

SEQ ID NO: 387 - DNA, 20 bp, Artificial sequence
  Antisense oligomer
atactggcatctgtttttga

SEQ ID NO: 388 - DNA, 20 bp, Artificial sequence
  Antisense oligomer
aatttttcctgtagaatact

SEQ ID NO: 389 - DNA, 20 bp, Artificial sequence
  Antisense oligomer
agattcaggcttcccaattt

SEQ ID NO: 390 - DNA, 20 bp, Artificial sequence
  Antisense oligomer
acctcctgccaccgcagatt

SEQ ID NO: 391 - DNA, 20 bp, Artificial sequence
  Antisense oligomer
gacagctgtttgcagacctc

SEQ ID NO: 392 - DNA, 20 bp, Artificial sequence
  Antisense oligomer
ctcttttttctgtctgacag

SEQ ID NO: 393 - DNA, 20 bp, Artificial sequence
  Antisense oligomer
cctacctcttttttctgtct

SEQ ID NO: 394 - DNA, 20 bp, Artificial sequence
  Antisense oligomer
gtcgccctacctcttttttc

SEQ ID NO: 395 - DNA, 20 bp, Artificial sequence
  Antisense oligomer
gatctgtcgccctacctctt

SEQ ID NO: 396 - DNA, 20 bp, Artificial sequence
  Antisense oligomer
tattagatctgtcgccctac

SEQ ID NO: 397 - DNA, 20 bp, Artificial sequence
  Antisense oligomer
attcctattagatctgtcgc

SEQ ID NO: 398 - DNA, 25 bp, Artificial sequence
  Antisense oligomer
gggggatttgagaaaataaaattac

SEQ ID NO: 399 - DNA, 25 bp, Artificial sequence
  Antisense oligomer
atttgagaaaataaaattaccttga

SEQ ID NO: 400 - DNA, 25 bp, Artificial sequence
  Antisense oligomer
ctagcctggagaaagaagaataaaa

SEQ ID NO: 401 - DNA, 25 bp, Artificial sequence
  Antisense oligomer
agaaaataaaattaccttgacttgc

SEQ ID NO: 402 - DNA, 25 bp, Artificial sequence
  Antisense oligomer
ttcttctagcctggagaaagaagaa

SEQ ID NO: 403 - DNA, 25 bp, Artificial sequence
  Antisense oligomer
ataaaattaccttgacttgctcaag

SEQ ID NO: 404 - DNA, 25 bp, Artificial sequence
  Antisense oligomer
ttttgttcttctagcctggagaaag

SEQ ID NO: 405 - DNA, 25 bp, Artificial sequence
  Antisense oligomer
attaccttgacttgctcaagctttt

SEQ ID NO: 406 - DNA, 25 bp, Artificial sequence
  Antisense oligomer
tattcttttgttcttctagcctgga

SEQ ID NO: 407 - DNA, 25 bp, Artificial sequence
  Antisense oligomer
cttgacttgctcaagcttttctttt

SEQ ID NO: 408 - DNA, 25 bp, Artificial sequence
  Antisense oligomer
caagatattcttttgttcttctagc

SEQ ID NO: 409 - DNA, 25 bp, Artificial sequence
  Antisense oligomer
cttttagttgctgctcttttccagg

SEQ ID NO: 410 - DNA, 25 bp, Artificial sequence
  Antisense oligomer
ccaggttcaagtgggatactagcaa

SEQ ID NO: 411 - DNA, 25 bp, Artificial sequence
  Antisense oligomer
atctctttgaaattctgacaagata

SEQ ID NO: 412 - DNA, 25 bp, Artificial sequence
  Antisense oligomer
agcaatgttatctgcttcctccaac

SEQ ID NO: 413 - DNA, 25 bp, Artificial sequence
  Antisense oligomer
aacaaattcatttaaatctctttga

SEQ ID NO: 414 - DNA, 25 bp, Artificial sequence
  Antisense oligomer
ccaaccataaaacaaattcatttaa

SEQ ID NO: 415 - DNA, 25 bp, Artificial sequence
  Antisense oligomer
ttcctccaaccataaaacaaattca

SEQ ID NO: 416 - DNA, 25 bp, Artificial sequence
  Antisense oligomer
tttaaatctctttgaaattctgaca

SEQ ID NO: 417 - DNA, 25 bp, Artificial sequence
  Antisense oligomer
tgacaagatattcttttgttcttct

SEQ ID NO: 418 - DNA, 25 bp, Artificial sequence
  Antisense oligomer
ttcaagtgggatactagcaatgtta

SEQ ID NO: 419 - DNA, 25 bp, Artificial sequence
  Antisense oligomer
agatattcttttgttcttctagcct

SEQ ID NO: 420 - DNA, 25 bp, Artificial sequence
  Antisense oligomer
ctgctcttttccaggttcaagtggg

SEQ ID NO: 421 - DNA, 25 bp, Artificial sequence
  Antisense oligomer
ttcttttgttcttctagcctggaga

SEQ ID NO: 422 - DNA, 25 bp, Artificial sequence
  Antisense oligomer
cttttcttttagttgctgctctttt

SEQ ID NO: 423 - DNA, 25 bp, Artificial sequence
  Antisense oligomer
ttgttcttctagcctggagaaagaa

SEQ ID NO: 424 - DNA, 25 bp, Artificial sequence
  Antisense oligomer
cttctagcctggagaaagaagaata

SEQ ID NO: 425 - DNA, 25 bp, Artificial sequence
  Antisense oligomer
agcctggagaaagaagaataaaatt

SEQ ID NO: 426 - DNA, 25 bp, Artificial sequence
  Antisense oligomer
ctggagaaagaagaataaaattgtt

SEQ ID NO: 427 - DNA, 20 bp, Artificial sequence
  Antisense oligomer
gaaagaagaataaaattgtt

SEQ ID NO: 428 - DNA, 20 bp, Artificial sequence
  Antisense oligomer
ggagaaagaagaataaaatt

SEQ ID NO: 429 - DNA, 20 bp, Artificial sequence
  Antisense oligomer
agcctggagaaagaagaata

SEQ ID NO: 430 - DNA, 20 bp, Artificial sequence
  Antisense oligomer
cttctagcctggagaaagaa

SEQ ID NO: 431 - DNA, 20 bp, Artificial sequence
  Antisense oligomer
ttgttcttctagcctggaga

SEQ ID NO: 432 - DNA, 20 bp, Artificial sequence
  Antisense oligomer
ttcttttgttcttctagcct

SEQ ID NO: 433 - DNA, 20 bp, Artificial sequence
  Antisense oligomer
tgacaagatattcttttgtt

SEQ ID NO: 434 - DNA, 20 bp, Artificial sequence
  Antisense oligomer
atctctttgaaattctgaca

SEQ ID NO: 435 - DNA, 20 bp, Artificial sequence
  Antisense oligomer
aacaaattcatttaaatctc

SEQ ID NO: 436 - DNA, 20 bp, Artificial sequence
  Antisense oligomer
ttcctccaaccataaaacaa

SEQ ID NO: 437 - DNA, 20 bp, Artificial sequence
  Antisense oligomer
agcaatgttatctgcttcct

SEQ ID NO: 438 - DNA, 20 bp, Artificial sequence
  Antisense oligomer
ttcaagtgggatactagcaa

SEQ ID NO: 439 - DNA, 20 bp, Artificial sequence
  Antisense oligomer
ctgctcttttccaggttcaa

SEQ ID NO: 440 - DNA, 20 bp, Artificial sequence
  Antisense oligomer
cttttcttttagttgctgct

SEQ ID NO: 441 - DNA, 20 bp, Artificial sequence
  Antisense oligomer
cttgacttgctcaagctttt

SEQ ID NO: 442 - DNA, 20 bp, Artificial sequence
  Antisense oligomer
attaccttgacttgctcaag

SEQ ID NO: 443 - DNA, 20 bp, Artificial sequence
  Antisense oligomer
ataaaattaccttgacttgc

SEQ ID NO: 444 - DNA, 20 bp, Artificial sequence
  Antisense oligomer
agaaaataaaattaccttga

SEQ ID NO: 445 - DNA, 20 bp, Artificial sequence
  Antisense oligomer
atttgagaaaataaaattac

SEQ ID NO: 446 - DNA, 20 bp, Artificial sequence
  Antisense oligomer
gggggatttgagaaaataaa

SEQ ID NO: 447 - DNA, 25 bp, Artificial sequence
  Antisense oligomer
ctgaaacagacaaatgcaacaacgt

SEQ ID NO: 448 - DNA, 25 bp, Artificial sequence
  Antisense oligomer
agtaactgaaacagacaaatgcaac

SEQ ID NO: 449 - DNA, 25 bp, Artificial sequence
  Antisense oligomer
ccaccagtaactgaaacagacaaat

SEQ ID NO: 450 - DNA, 25 bp, Artificial sequence
  Antisense oligomer
ctcttccaccagtaactgaaacaga

SEQ ID NO: 451 - DNA, 25 bp, Artificial sequence
  Antisense oligomer
ggcaactcttccaccagtaactgaa

SEQ ID NO: 452 - DNA, 25 bp, Artificial sequence
  Antisense oligomer
gcaggggcaactcttccaccagtaa

SEQ ID NO: 453 - DNA, 25 bp, Artificial sequence
  Antisense oligomer
ctggcgcaggggcaactcttccacc

SEQ ID NO: 454 - DNA, 25 bp, Artificial sequence
  Antisense oligomer
tttaattgtttgagaattccctggc

SEQ ID NO: 455 - DNA, 25 bp, Artificial sequence
  Antisense oligomer
ttgtttgagaattccctggcgcagg

SEQ ID NO: 456 - DNA, 25 bp, Artificial sequence
  Antisense oligomer
gcacgggtcctccagtttcatttaa

SEQ ID NO: 457 - DNA, 25 bp, Artificial sequence
  Antisense oligomer
tccagtttcatttaattgtttgaga

SEQ ID NO: 458 - DNA, 25 bp, Artificial sequence
  Antisense oligomer
gcttatgggagcacttacaagcacg

SEQ ID NO: 459 - DNA, 25 bp, Artificial sequence
  Antisense oligomer
tacaagcacgggtcctccagtttca

SEQ ID NO: 460 - DNA, 25 bp, Artificial sequence
  Antisense oligomer
agtttatcttgctcttctgggctta

SEQ ID NO: 461 - DNA, 25 bp, Artificial sequence
  Antisense oligomer
tctgcttgagcttattttcaagttt

SEQ ID NO: 462 - DNA, 25 bp, Artificial sequence
  Antisense oligomer
atcttgctcttctgggcttatggga

SEQ ID NO: 463 - DNA, 25 bp, Artificial sequence
  Antisense oligomer
ctttatccactggagatttgtctgc

SEQ ID NO: 464 - DNA, 25 bp, Artificial sequence
  Antisense oligomer
cttattttcaagtttatcttgctct

SEQ ID NO: 465 - DNA, 25 bp, Artificial sequence
  Antisense oligomer
ctaacctttatccactggagatttg

SEQ ID NO: 466 - DNA, 25 bp, Artificial sequence
  Antisense oligomer
atttgtctgcttgagcttattttca

SEQ ID NO: 467 - DNA, 25 bp, Artificial sequence
  Antisense oligomer
aatgtctaacctttatccactggag

SEQ ID NO: 468 - DNA, 25 bp, Artificial sequence
  Antisense oligomer
tggttaatgtctaacctttatccac

SEQ ID NO: 469 - DNA, 25 bp, Artificial sequence
  Antisense oligomer
agagatggttaatgtctaaccttta

SEQ ID NO: 470 - DNA, 25 bp, Artificial sequence
  Antisense oligomer
acggaagagatggttaatgtctaac

SEQ ID NO: 471 - DNA, 20 bp, Artificial sequence
  Antisense oligomer
acagacaaatgcaacaacgt

SEQ ID NO: 472 - DNA, 20 bp, Artificial sequence
  Antisense oligomer
ctgaaacagacaaatgcaac

SEQ ID NO: 473 - DNA, 20 bp, Artificial sequence
  Antisense oligomer
agtaactgaaacagacaaat

SEQ ID NO: 474 - DNA, 20 bp, Artificial sequence
  Antisense oligomer
ccaccagtaactgaaacaga

SEQ ID NO: 475 - DNA, 20 bp, Artificial sequence
  Antisense oligomer
ctcttccaccagtaactgaa

SEQ ID NO: 476 - DNA, 20 bp, Artificial sequence
  Antisense oligomer
ggcaactcttccaccagtaa

SEQ ID NO: 477 - DNA, 20 bp, Artificial sequence
  Antisense oligomer
ctggcgcaggggcaactctt

SEQ ID NO: 478 - DNA, 20 bp, Artificial sequence
  Antisense oligomer
ttgtttgagaattccctggc

SEQ ID NO: 479 - DNA, 20 bp, Artificial sequence
  Antisense oligomer
tccagtttcatttaattgtt

SEQ ID NO: 480 - DNA, 20 bp, Artificial sequence
  Antisense oligomer
tacaagcacgggtcctccag

SEQ ID NO: 481 - DNA, 20 bp, Artificial sequence
  Antisense oligomer
gcttatgggagcacttacaa

SEQ ID NO: 482 - DNA, 20 bp, Artificial sequence
  Antisense oligomer
atcttgctcttctgggctta

SEQ ID NO: 483 - DNA, 20 bp, Artificial sequence
  Antisense oligomer
cttattttcaagtttatctt

SEQ ID NO: 484 - DNA, 20 bp, Artificial sequence
  Antisense oligomer
atttgtctgcttgagcttat

SEQ ID NO: 485 - DNA, 20 bp, Artificial sequence
  Antisense oligomer
ctttatccactggagatttg

SEQ ID NO: 486 - DNA, 20 bp, Artificial sequence
  Antisense oligomer
ctaacctttatccactggag

SEQ ID NO: 487 - DNA, 20 bp, Artificial sequence
  Antisense oligomer
aatgtctaacctttatccac

SEQ ID NO: 488 - DNA, 20 bp, Artificial sequence
  Antisense oligomer
tggttaatgtctaaccttta

SEQ ID NO: 489 - DNA, 20 bp, Artificial sequence
  Antisense oligomer
agagatggttaatgtctaac

SEQ ID NO: 490 - DNA, 20 bp, Artificial sequence
  Antisense oligomer
acggaagagatggttaatgt

SEQ ID NO: 491 - DNA, 25 bp, Artificial sequence
  Antisense oligomer
ctgaaaggaaaatacattttaaaaa

SEQ ID NO: 492 - DNA, 25 bp, Artificial sequence
  Antisense oligomer
cctgaaaggaaaatacattttaaaa

SEQ ID NO: 493 - DNA, 25 bp, Artificial sequence
  Antisense oligomer
gaaacctgaaaggaaaatacatttt

SEQ ID NO: 494 - DNA, 25 bp, Artificial sequence
  Antisense oligomer
ggaaacctgaaaggaaaatacattt

SEQ ID NO: 495 - DNA, 25 bp, Artificial sequence
  Antisense oligomer
ctctggaaacctgaaaggaaaatac

SEQ ID NO: 496 - DNA, 25 bp, Artificial sequence
  Antisense oligomer
gctctggaaacctgaaaggaaaata

SEQ ID NO: 497 - DNA, 25 bp, Artificial sequence
  Antisense oligomer
taaagctctggaaacctgaaaggaa

SEQ ID NO: 498 - DNA, 25 bp, Artificial sequence
  Antisense oligomer
gtaaagctctggaaacctgaaagga

SEQ ID NO: 499 - DNA, 25 bp, Artificial sequence
  Antisense oligomer
tcaggtaaagctctggaaacctgaa

SEQ ID NO: 500 - DNA, 25 bp, Artificial sequence
  Antisense oligomer
ctcaggtaaagctctggaaacctga

SEQ ID NO: 501 - DNA, 25 bp, Artificial sequence
  Antisense oligomer
gtttctcaggtaaagctctggaaac

SEQ ID NO: 502 - DNA, 25 bp, Artificial sequence
  Antisense oligomer
tgtttctcaggtaaagctctggaaa

SEQ ID NO: 503 - DNA, 25 bp, Artificial sequence
  Antisense oligomer
aatttctccttgtttctcaggtaaa

SEQ ID NO: 504 - DNA, 25 bp, Artificial sequence
  Antisense oligomer
tttgagcttcaatttctccttgttt

SEQ ID NO: 505 - DNA, 25 bp, Artificial sequence
  Antisense oligomer
ttttatttgagcttcaatttctcct

SEQ ID NO: 506 - DNA, 25 bp, Artificial sequence
  Antisense oligomer
aagctgcccaaggtcttttatttga

SEQ ID NO: 507 - DNA, 25 bp, Artificial sequence
  Antisense oligomer
aggtcttcaagctttttttcaagct

SEQ ID NO: 508 - DNA, 25 bp, Artificial sequence
  Antisense oligomer
ttcaagctttttttcaagctgccca

SEQ ID NO: 509 - DNA, 25 bp, Artificial sequence
  Antisense oligomer
gatgatttaactgctcttcaaggtc

SEQ ID NO: 510 - DNA, 25 bp, Artificial sequence
  Antisense oligomer
ctgctcttcaaggtcttcaagcttt

SEQ ID NO: 511 - DNA, 25 bp, Artificial sequence
  Antisense oligomer
aggagataaccacagcagcagatga

SEQ ID NO: 512 - DNA, 25 bp, Artificial sequence
  Antisense oligomer
cagcagatgatttaactgctcttca

SEQ ID NO: 513 - DNA, 25 bp, Artificial sequence
  Antisense oligomer
atttccaactgattcctaataggag

SEQ ID NO: 514 - DNA, 25 bp, Artificial sequence
  Antisense oligomer
cttggtttggttggttataaatttc

SEQ ID NO: 515 - DNA, 25 bp, Artificial sequence
  Antisense oligomer
caactgattcctaataggagataac

SEQ ID NO: 516 - DNA, 25 bp, Artificial sequence
  Antisense oligomer
cttaacgtcaaatggtccttcttgg

SEQ ID NO: 517 - DNA, 25 bp, Artificial sequence
  Antisense oligomer
ttggttataaatttccaactgattc

SEQ ID NO: 518 - DNA, 25 bp, Artificial sequence
  Antisense oligomer
cctaccttaacgtcaaatggtcctt

SEQ ID NO: 519 - DNA, 25 bp, Artificial sequence
  Antisense oligomer
tccttcttggtttggttggttataa

SEQ ID NO: 520 - DNA, 25 bp, Artificial sequence
  Antisense oligomer
agttccctaccttaacgtcaaatgg

SEQ ID NO: 521 - DNA, 25 bp, Artificial sequence
  Antisense oligomer
caaaaagttccctaccttaacgtca

SEQ ID NO: 522 - DNA, 25 bp, Artificial sequence
  Antisense oligomer
taaagcaaaaagttccctaccttaa

SEQ ID NO: 523 - DNA, 25 bp, Artificial sequence
  Antisense oligomer
atatttaaagcaaaaagttccctac

SEQ ID NO: 524 - DNA, 20 bp, Artificial sequence
  Antisense oligomer
aggaaaatacattttaaaaa

SEQ ID NO: 525 - DNA, 20 bp, Artificial sequence
  Antisense oligomer
aaggaaaatacattttaaaa

SEQ ID NO: 526 - DNA, 20 bp, Artificial sequence
  Antisense oligomer
cctgaaaggaaaatacattt

SEQ ID NO: 527 - DNA, 20 bp, Artificial sequence
  Antisense oligomer
ggaaacctgaaaggaaaata

SEQ ID NO: 528 - DNA, 20 bp, Artificial sequence
  Antisense oligomer
gctctggaaacctgaaagga

SEQ ID NO: 529 - DNA, 20 bp, Artificial sequence
  Antisense oligomer
gtaaagctctggaaacctga

SEQ ID NO: 530 - DNA, 20 bp, Artificial sequence
  Antisense oligomer
ctcaggtaaagctctggaaa

SEQ ID NO: 531 - DNA, 20 bp, Artificial sequence
  Antisense oligomer
aatttctccttgtttctcag

SEQ ID NO: 532 - DNA, 20 bp, Artificial sequence
  Antisense oligomer
ttttatttgagcttcaattt

SEQ ID NO: 533 - DNA, 20 bp, Artificial sequence
  Antisense oligomer
aagctgcccaaggtctttta

SEQ ID NO: 534 - DNA, 20 bp, Artificial sequence
  Antisense oligomer
ttcaagctttttttcaagct

SEQ ID NO: 535 - DNA, 20 bp, Artificial sequence
  Antisense oligomer
ctgctcttcaaggtcttcaa

SEQ ID NO: 536 - DNA, 20 bp, Artificial sequence
  Antisense oligomer
cagcagatgatttaactgct

SEQ ID NO: 537 - DNA, 20 bp, Artificial sequence
  Antisense oligomer
aggagataaccacagcagca

SEQ ID NO: 538 - DNA, 20 bp, Artificial sequence
  Antisense oligomer
caactgattcctaataggag

SEQ ID NO: 539 - DNA, 20 bp, Artificial sequence
  Antisense oligomer
ttggttataaatttccaact

SEQ ID NO: 540 - DNA, 20 bp, Artificial sequence
  Antisense oligomer
tccttcttggtttggttggt

SEQ ID NO: 541 - DNA, 20 bp, Artificial sequence
  Antisense oligomer
cttaacgtcaaatggtcctt

SEQ ID NO: 542 - DNA, 20 bp, Artificial sequence
  Antisense oligomer
cctaccttaacgtcaaatgg

SEQ ID NO: 543 - DNA, 20 bp, Artificial sequence
  Antisense oligomer
agttccctaccttaacgtca

SEQ ID NO: 544 - DNA, 20 bp, Artificial sequence
  Antisense oligomer
caaaaagttccctaccttaa

SEQ ID NO: 545 - DNA, 20 bp, Artificial sequence
  Antisense oligomer
taaagcaaaaagttccctac

SEQ ID NO: 546 - DNA, 20 bp, Artificial sequence
  Antisense oligomer
atatttaaagcaaaaagttc

SEQ ID NO: 547 - DNA, 25 bp, Artificial sequence
  Antisense oligomer
ctggggaaaagaacccatatagtgc

SEQ ID NO: 548 - DNA, 25 bp, Artificial sequence
  Antisense oligomer
tcctggggaaaagaacccatatagt

SEQ ID NO: 549 - DNA, 25 bp, Artificial sequence
  Antisense oligomer
gtttcctggggaaaagaacccatat

SEQ ID NO: 550 - DNA, 25 bp, Artificial sequence
  Antisense oligomer
cagtttcctggggaaaagaacccat

SEQ ID NO: 551 - DNA, 25 bp, Artificial sequence
  Antisense oligomer
tttcagtttcctggggaaaagaacc

SEQ ID NO: 552 - DNA, 25 bp, Artificial sequence
  Antisense oligomer
tatttcagtttcctggggaaaagaa

SEQ ID NO: 553 - DNA, 25 bp, Artificial sequence
  Antisense oligomer
tgctatttcagtttcctggggaaaa

SEQ ID NO: 554 - DNA, 25 bp, Artificial sequence
  Antisense oligomer
actgctatttcagtttcctggggaa

SEQ ID NO: 555 - DNA, 25 bp, Artificial sequence
  Antisense oligomer
tgaactgctatttcagtttcctggg

SEQ ID NO: 556 - DNA, 25 bp, Artificial sequence
  Antisense oligomer
cttgaactgctatttcagtttcctg

SEQ ID NO: 557 - DNA, 25 bp, Artificial sequence
  Antisense oligomer
tagcttgaactgctatttcagtttc

SEQ ID NO: 558 - DNA, 25 bp, Artificial sequence
  Antisense oligomer
tttagcttgaactgctatttcagtt

SEQ ID NO: 559 - DNA, 25 bp, Artificial sequence
  Antisense oligomer
ttccacatccggttgtttagcttga

SEQ ID NO: 560 - DNA, 25 bp, Artificial sequence
  Antisense oligomer
tgccctttagacaaaatctcttcca

SEQ ID NO: 561 - DNA, 25 bp, Artificial sequence
  Antisense oligomer
tttagacaaaatctcttccacatcc

SEQ ID NO: 562 - DNA, 25 bp, Artificial sequence
  Antisense oligomer
gtttttccttgtacaaatgctgccc

SEQ ID NO: 563 - DNA, 25 bp, Artificial sequence
  Antisense oligomer
gtacaaatgctgccctttagacaaa

SEQ ID NO: 564 - DNA, 25 bp, Artificial sequence
  Antisense oligomer
cttcactggctgagtggctggtttt

SEQ ID NO: 565 - DNA, 25 bp, Artificial sequence
  Antisense oligomer
ggctggtttttccttgtacaaatgc

SEQ ID NO: 566 - DNA, 25 bp, Artificial sequence
  Antisense oligomer
attaccttcactggctgagtggctg

SEQ ID NO: 567 - DNA, 25 bp, Artificial sequence
  Antisense oligomer
gcttcattaccttcactggctgagt

SEQ ID NO: 568 - DNA, 25 bp, Artificial sequence
  Antisense oligomer
aggttgcttcattaccttcactggc

SEQ ID NO: 569 - DNA, 25 bp, Artificial sequence
  Antisense oligomer
gctagaggttgcttcattaccttca

SEQ ID NO: 570 - DNA, 25 bp, Artificial sequence
  Antisense oligomer
atattgctagaggttgcttcattac

SEQ ID NO: 571 - DNA, 20 bp, Artificial sequence
  Antisense oligomer
gaaaagaacccatatagtgc

SEQ ID NO: 572 - DNA, 20 bp, Artificial sequence
  Antisense oligomer
gggaaaagaacccatatagt

SEQ ID NO: 573 - DNA, 20 bp, Artificial sequence
  Antisense oligomer
tcctggggaaaagaacccat

SEQ ID NO: 574 - DNA, 20 bp, Artificial sequence
  Antisense oligomer
cagtttcctggggaaaagaa

SEQ ID NO: 575 - DNA, 20 bp, Artificial sequence
  Antisense oligomer
tatttcagtttcctggggaa

SEQ ID NO: 576 - DNA, 20 bp, Artificial sequence
  Antisense oligomer
actgctatttcagtttcctg

SEQ ID NO: 577 - DNA, 20 bp, Artificial sequence
  Antisense oligomer
cttgaactgctatttcagtt

SEQ ID NO: 578 - DNA, 20 bp, Artificial sequence
  Antisense oligomer
tttagcttgaactgctattt

SEQ ID NO: 579 - DNA, 20 bp, Artificial sequence
  Antisense oligomer
ttccacatccggttgtttag

SEQ ID NO: 580 - DNA, 20 bp, Artificial sequence
  Antisense oligomer
tttagacaaaatctcttcca

SEQ ID NO: 581 - DNA, 20 bp, Artificial sequence
  Antisense oligomer
gtacaaatgctgccctttag

SEQ ID NO: 582 - DNA, 20 bp, Artificial sequence
  Antisense oligomer
ggctggtttttccttgtaca

SEQ ID NO: 583 - DNA, 20 bp, Artificial sequence
  Antisense oligomer
cttcactggctgagtggctg

SEQ ID NO: 584 - DNA, 20 bp, Artificial sequence
  Antisense oligomer
attaccttcactggctgagt

SEQ ID NO: 585 - DNA, 20 bp, Artificial sequence
  Antisense oligomer
gcttcattaccttcactggc

SEQ ID NO: 586 - DNA, 20 bp, Artificial sequence
  Antisense oligomer
aggttgcttcattaccttca

SEQ ID NO: 587 - DNA, 20 bp, Artificial sequence
  Antisense oligomer
gctagaggttgcttcattac

SEQ ID NO: 588 - DNA, 20 bp, Artificial sequence
  Antisense oligomer
atattgctagaggttgcttc

SEQ ID NO: 589 - DNA, 25 bp, Artificial sequence
  Antisense oligomer
ctttaacagaaaagcatacacatta

SEQ ID NO: 590 - DNA, 25 bp, Artificial sequence
  Antisense oligomer
tcctctttaacagaaaagcatacac

SEQ ID NO: 591 - DNA, 25 bp, Artificial sequence
  Antisense oligomer
ttcctctttaacagaaaagcataca

SEQ ID NO: 592 - DNA, 25 bp, Artificial sequence
  Antisense oligomer
taacttcctctttaacagaaaagca

SEQ ID NO: 593 - DNA, 25 bp, Artificial sequence
  Antisense oligomer
ctaacttcctctttaacagaaaagc

SEQ ID NO: 594 - DNA, 25 bp, Artificial sequence
  Antisense oligomer
tcttctaacttcctctttaacagaa

SEQ ID NO: 595 - DNA, 25 bp, Artificial sequence
  Antisense oligomer
atcttctaacttcctctttaacaga

SEQ ID NO: 596 - DNA, 25 bp, Artificial sequence
  Antisense oligomer
tcagatcttctaacttcctctttaa

SEQ ID NO: 597 - DNA, 25 bp, Artificial sequence
  Antisense oligomer
ctcagatcttctaacttcctcttta

SEQ ID NO: 598 - DNA, 25 bp, Artificial sequence
  Antisense oligomer
agagctcagatcttctaacttcctc

SEQ ID NO: 599 - DNA, 25 bp, Artificial sequence
  Antisense oligomer
cagagctcagatcttctaacttcct

SEQ ID NO: 600 - DNA, 24 bp, Artificial sequence
  Antisense oligomer
cactcagagctcagatcttctact

SEQ ID NO: 601 - DNA, 25 bp, Artificial sequence
  Antisense oligomer
ccttccactcagagctcagatcttc

SEQ ID NO: 602 - DNA, 25 bp, Artificial sequence
  Antisense oligomer
gtaaacggtttaccgccttccactc

SEQ ID NO: 603 - DNA, 25 bp, Artificial sequence
  Antisense oligomer
ctttgccctcagctcttgaagtaaa

SEQ ID NO: 604 - DNA, 25 bp, Artificial sequence
  Antisense oligomer
ccctcagctcttgaagtaaacggtt

SEQ ID NO: 605 - DNA, 25 bp, Artificial sequence
  Antisense oligomer
ccaggagctaggtcaggctgctttg

SEQ ID NO: 606 - DNA, 25 bp, Artificial sequence
  Antisense oligomer
ggtcaggctgctttgccctcagctc

SEQ ID NO: 607 - DNA, 25 bp, Artificial sequence
  Antisense oligomer
aggctccaatagtggtcagtccagg

SEQ ID NO: 608 - DNA, 25 bp, Artificial sequence
  Antisense oligomer
tcagtccaggagctaggtcaggctg

SEQ ID NO: 609 - DNA, 25 bp, Artificial sequence
  Antisense oligomer
cttacaggctccaatagtggtcagt

SEQ ID NO: 610 - DNA, 25 bp, Artificial sequence
  Antisense oligomer
gtatacttacaggctccaatagtgg

SEQ ID NO: 611 - DNA, 25 bp, Artificial sequence
  Antisense oligomer
atccagtatacttacaggctccaat

SEQ ID NO: 612 - DNA, 25 bp, Artificial sequence
  Antisense oligomer
atgggatccagtatacttacaggct

SEQ ID NO: 613 - DNA, 25 bp, Artificial sequence
  Antisense oligomer
agagaatgggatccagtatacttac

SEQ ID NO: 614 - DNA, 20 bp, Artificial sequence
  Antisense oligomer
acagaaaagcatacacatta

SEQ ID NO: 615 - DNA, 20 bp, Artificial sequence
  Antisense oligomer
tttaacagaaaagcatacac

SEQ ID NO: 616 - DNA, 20 bp, Artificial sequence
  Antisense oligomer
tcctctttaacagaaaagca

SEQ ID NO: 617 - DNA, 20 bp, Artificial sequence
  Antisense oligomer
taacttcctctttaacagaa

SEQ ID NO: 618 - DNA, 20 bp, Artificial sequence
  Antisense oligomer
tcttctaacttcctctttaa

SEQ ID NO: 619 - DNA, 20 bp, Artificial sequence
  Antisense oligomer
tcagatcttctaacttcctc

SEQ ID NO: 620 - DNA, 20 bp, Artificial sequence
  Antisense oligomer
ccttccactcagagctcaga

SEQ ID NO: 621 - DNA, 20 bp, Artificial sequence
  Antisense oligomer
gtaaacggtttaccgccttc

SEQ ID NO: 622 - DNA, 20 bp, Artificial sequence
  Antisense oligomer
ccctcagctcttgaagtaaa

SEQ ID NO: 623 - DNA, 20 bp, Artificial sequence
  Antisense oligomer
ggtcaggctgctttgccctc

SEQ ID NO: 624 - DNA, 20 bp, Artificial sequence
  Antisense oligomer
tcagtccaggagctaggtca

SEQ ID NO: 625 - DNA, 20 bp, Artificial sequence
  Antisense oligomer
aggctccaatagtggtcagt

SEQ ID NO: 626 - DNA, 20 bp, Artificial sequence
  Antisense oligomer
cttacaggctccaatagtgg

SEQ ID NO: 627 - DNA, 20 bp, Artificial sequence
  Antisense oligomer
gtatacttacaggctccaat

SEQ ID NO: 628 - DNA, 20 bp, Artificial sequence
  Antisense oligomer
atccagtatacttacaggct

SEQ ID NO: 629 - DNA, 20 bp, Artificial sequence
  Antisense oligomer
atgggatccagtatacttac

SEQ ID NO: 630 - DNA, 20 bp, Artificial sequence
  Antisense oligomer
agagaatgggatccagtata

SEQ ID NO: 631 - DNA, 26 bp, Artificial sequence
  Antisense oligomer
ctaaaatattttgggtttttgcaaaa

SEQ ID NO: 632 - DNA, 26 bp, Artificial sequence
  Antisense oligomer
gctaaaatattttgggtttttgcaaa

SEQ ID NO: 633 - DNA, 26 bp, Artificial sequence
  Antisense oligomer
taggagctaaaatattttgggttttt

SEQ ID NO: 634 - DNA, 25 bp, Artificial sequence
  Antisense oligomer
agtaggagctaaaatattttgggtt

SEQ ID NO: 635 - DNA, 25 bp, Artificial sequence
  Antisense oligomer
tgagtaggagctaaaatattttggg

SEQ ID NO: 636 - DNA, 26 bp, Artificial sequence
  Antisense oligomer
ctgagtaggagctaaaatattttggg

SEQ ID NO: 637 - DNA, 25 bp, Artificial sequence
  Antisense oligomer
cagtctgagtaggagctaaaatatt

SEQ ID NO: 638 - DNA, 26 bp, Artificial sequence
  Antisense oligomer
acagtctgagtaggagctaaaatatt

SEQ ID NO: 639 - DNA, 26 bp, Artificial sequence
  Antisense oligomer
gagtaacagtctgagtaggagctaaa

SEQ ID NO: 640 - DNA, 25 bp, Artificial sequence
  Antisense oligomer
cagagtaacagtctgagtaggagct

SEQ ID NO: 641 - DNA, 26 bp, Artificial sequence
  Antisense oligomer
caccagagtaacagtctgagtaggag

SEQ ID NO: 642 - DNA, 25 bp, Artificial sequence
  Antisense oligomer
gtcaccagagtaacagtctgagtag

SEQ ID NO: 643 - DNA, 26 bp, Artificial sequence
  Antisense oligomer
aaccacaggttgtgtcaccagagtaa

SEQ ID NO: 644 - DNA, 25 bp, Artificial sequence
  Antisense oligomer
gttgtgtcaccagagtaacagtctg

SEQ ID NO: 645 - DNA, 26 bp, Artificial sequence
  Antisense oligomer
tggcagtttccttagtaaccacaggt

SEQ ID NO: 646 - DNA, 26 bp, Artificial sequence
  Antisense oligomer
atttctagtttggagatggcagtttc

SEQ ID NO: 647 - DNA, 25 bp, Artificial sequence
  Antisense oligomer
ggaagatggcatttctagtttggag

SEQ ID NO: 648 - DNA, 26 bp, Artificial sequence
  Antisense oligomer
catcaaggaagatggcatttctagtt

SEQ ID NO: 649 - DNA, 26 bp, Artificial sequence
  Antisense oligomer
gagcaggtacctccaacatcaaggaa

SEQ ID NO: 650 - DNA, 25 bp, Artificial sequence
  Antisense oligomer
atctgccagagcaggtacctccaac

SEQ ID NO: 651 - DNA, 26 bp, Artificial sequence
  Antisense oligomer
aagttctgtccaagcccggttgaaat

SEQ ID NO: 652 - DNA, 26 bp, Artificial sequence
  Antisense oligomer
cggttgaaatctgccagagcaggtac

SEQ ID NO: 653 - DNA, 26 bp, Artificial sequence
  Antisense oligomer
gagaaagccagtcggtaagttctgtc

SEQ ID NO: 654 - DNA, 25 bp, Artificial sequence
  Antisense oligomer
gtcggtaagttctgtccaagcccgg

SEQ ID NO: 655 - DNA, 26 bp, Artificial sequence
  Antisense oligomer
ataacttgatcaagcagagaaagcca

SEQ ID NO: 656 - DNA, 25 bp, Artificial sequence
  Antisense oligomer
aagcagagaaagccagtcggtaagt

SEQ ID NO: 657 - DNA, 26 bp, Artificial sequence
  Antisense oligomer
caccctctgtgattttataacttgat

SEQ ID NO: 658 - DNA, 26 bp, Artificial sequence
  Antisense oligomer
caaggtcacccaccatcaccctctgt

SEQ ID NO: 659 - DNA, 25 bp, Artificial sequence
  Antisense oligomer
catcaccctctgtgattttataact

SEQ ID NO: 660 - DNA, 26 bp, Artificial sequence
  Antisense oligomer
cttctgcttgatgatcatctcgttga

SEQ ID NO: 661 - DNA, 26 bp, Artificial sequence
  Antisense oligomer
ccttctgcttgatgatcatctcgttg

SEQ ID NO: 662 - DNA, 26 bp, Artificial sequence
  Antisense oligomer
atctcgttgatatcctcaaggtcacc

SEQ ID NO: 663 - DNA, 26 bp, Artificial sequence
  Antisense oligomer
tcataccttctgcttgatgatcatct

SEQ ID NO: 664 - DNA, 26 bp, Artificial sequence
  Antisense oligomer
tcattttttctcataccttctgcttg

SEQ ID NO: 665 - DNA, 26 bp, Artificial sequence
  Antisense oligomer
ttttctcataccttctgcttgatgat

SEQ ID NO: 666 - DNA, 26 bp, Artificial sequence
  Antisense oligomer
ttttatcattttttctcataccttct

SEQ ID NO: 667 - DNA, 26 bp, Artificial sequence
  Antisense oligomer
ccaacttttatcattttttctcatac

SEQ ID NO: 668 - DNA, 20 bp, Artificial sequence
  Antisense oligomer
atattttgggtttttgcaaa

SEQ ID NO: 669 - DNA, 20 bp, Artificial sequence
  Antisense oligomer
aaaatattttgggtttttgc

SEQ ID NO: 670 - DNA, 20 bp, Artificial sequence
  Antisense oligomer
gagctaaaatattttgggtt

SEQ ID NO: 671 - DNA, 20 bp, Artificial sequence
  Antisense oligomer
agtaggagctaaaatatttt

SEQ ID NO: 672 - DNA, 20 bp, Artificial sequence
  Antisense oligomer
gtctgagtaggagctaaaat

SEQ ID NO: 673 - DNA, 20 bp, Artificial sequence
  Antisense oligomer
taacagtctgagtaggagct

SEQ ID NO: 674 - DNA, 20 bp, Artificial sequence
  Antisense oligomer
cagagtaacagtctgagtag

SEQ ID NO: 675 - DNA, 20 bp, Artificial sequence
  Antisense oligomer
cacaggttgtgtcaccagag

SEQ ID NO: 676 - DNA, 20 bp, Artificial sequence
  Antisense oligomer
agtttccttagtaaccacag

SEQ ID NO: 677 - DNA, 20 bp, Artificial sequence
  Antisense oligomer
tagtttggagatggcagttt

SEQ ID NO: 678 - DNA, 20 bp, Artificial sequence
  Antisense oligomer
ggaagatggcatttctagtt

SEQ ID NO: 679 - DNA, 20 bp, Artificial sequence
  Antisense oligomer
tacctccaacatcaaggaag

SEQ ID NO: 680 - DNA, 20 bp, Artificial sequence
  Antisense oligomer
atctgccagagcaggtacct

SEQ ID NO: 681 - DNA, 20 bp, Artificial sequence
  Antisense oligomer
ccaagcccggttgaaatctg

SEQ ID NO: 682 - DNA, 20 bp, Artificial sequence
  Antisense oligomer
gtcggtaagttctgtccaag

SEQ ID NO: 683 - DNA, 20 bp, Artificial sequence
  Antisense oligomer
aagcagagaaagccagtcgg

SEQ ID NO: 684 - DNA, 20 bp, Artificial sequence
  Antisense oligomer
ttttataacttgatcaagca

SEQ ID NO: 685 - DNA, 20 bp, Artificial sequence
  Antisense oligomer
catcaccctctgtgatttta

SEQ ID NO: 686 - DNA, 20 bp, Artificial sequence
  Antisense oligomer
ctcaaggtcacccaccatca

SEQ ID NO: 687 - DNA, 20 bp, Artificial sequence
  Antisense oligomer
catctcgttgatatcctcaa

SEQ ID NO: 688 - DNA, 20 bp, Artificial sequence
  Antisense oligomer
cttctgcttgatgatcatct

SEQ ID NO: 689 - DNA, 20 bp, Artificial sequence
  Antisense oligomer
cataccttctgcttgatgat

SEQ ID NO: 690 - DNA, 20 bp, Artificial sequence
  Antisense oligomer
tttctcataccttctgcttg

SEQ ID NO: 691 - DNA, 20 bp, Artificial sequence
  Antisense oligomer
cattttttctcataccttct

SEQ ID NO: 692 - DNA, 20 bp, Artificial sequence
  Antisense oligomer
tttatcattttttctcatac

SEQ ID NO: 693 - DNA, 20 bp, Artificial sequence
  Antisense oligomer
caacttttatcattttttct

SEQ ID NO: 694 - DNA, 25 bp, Artificial sequence
  Antisense oligomer
ctgtaagaacaaatatcccttagta

SEQ ID NO: 695 - DNA, 25 bp, Artificial sequence
  Antisense oligomer
tgcctgtaagaacaaatatccctta

SEQ ID NO: 696 - DNA, 25 bp, Artificial sequence
  Antisense oligomer
gttgcctgtaagaacaaatatccct

SEQ ID NO: 697 - DNA, 25 bp, Artificial sequence
  Antisense oligomer
attgttgcctgtaagaacaaatatc

SEQ ID NO: 698 - DNA, 25 bp, Artificial sequence
  Antisense oligomer
gcattgttgcctgtaagaacaaata

SEQ ID NO: 699 - DNA, 25 bp, Artificial sequence
  Antisense oligomer
cctgcattgttgcctgtaagaacaa

SEQ ID NO: 700 - DNA, 25 bp, Artificial sequence
  Antisense oligomer
atcctgcattgttgcctgtaagaac

SEQ ID NO: 701 - DNA, 25 bp, Artificial sequence
  Antisense oligomer
caaatcctgcattgttgcctgtaag

SEQ ID NO: 702 - DNA, 25 bp, Artificial sequence
  Antisense oligomer
tccaaatcctgcattgttgcctgta

SEQ ID NO: 703 - DNA, 25 bp, Artificial sequence
  Antisense oligomer
tgttccaaatcctgcattgttgcct

SEQ ID NO: 704 - DNA, 25 bp, Artificial sequence
  Antisense oligomer
tctgttccaaatcctgcattgttgc

SEQ ID NO: 705 - DNA, 25 bp, Artificial sequence
  Antisense oligomer
aactggggacgcctctgttccaaat

SEQ ID NO: 706 - DNA, 25 bp, Artificial sequence
  Antisense oligomer
gcctctgttccaaatcctgcattgt

SEQ ID NO: 707 - DNA, 25 bp, Artificial sequence
  Antisense oligomer
cagcggtaatgagttcttccaactg

SEQ ID NO: 708 - DNA, 25 bp, Artificial sequence
  Antisense oligomer
cttccaactggggacgcctctgttc

SEQ ID NO: 709 - DNA, 25 bp, Artificial sequence
  Antisense oligomer
cttgtttttcaaattttgggcagcg

SEQ ID NO: 710 - DNA, 25 bp, Artificial sequence
  Antisense oligomer
ctagcctcttgattgctggtcttgt

SEQ ID NO: 711 - DNA, 25 bp, Artificial sequence
  Antisense oligomer
ttttcaaattttgggcagcggtaat

SEQ ID NO: 712 - DNA, 25 bp, Artificial sequence
  Antisense oligomer
ttcgatccgtaatgattgttctagc

SEQ ID NO: 713 - DNA, 25 bp, Artificial sequence
  Antisense oligomer
gattgctggtcttgtttttcaaatt

SEQ ID NO: 714 - DNA, 25 bp, Artificial sequence
  Antisense oligomer
cttacttcgatccgtaatgattgtt

SEQ ID NO: 715 - DNA, 25 bp, Artificial sequence
  Antisense oligomer
ttgttctagcctcttgattgctggt

SEQ ID NO: 716 - DNA, 25 bp, Artificial sequence
  Antisense oligomer
aaaaacttacttcgatccgtaatga

SEQ ID NO: 717 - DNA, 25 bp, Artificial sequence
  Antisense oligomer
tgttaaaaaacttacttcgatccgt

SEQ ID NO: 718 - DNA, 25 bp, Artificial sequence
  Antisense oligomer
atgcttgttaaaaaacttacttcga

SEQ ID NO: 719 - DNA, 25 bp, Artificial sequence
  Antisense oligomer
gtcccatgcttgttaaaaaacttac

SEQ ID NO: 720 - DNA, 20 bp, Artificial sequence
  Antisense oligomer
agaacaaatatcccttagta

SEQ ID NO: 721 - DNA, 20 bp, Artificial sequence
  Antisense oligomer
gtaagaacaaatatccctta

SEQ ID NO: 722 - DNA, 20 bp, Artificial sequence
  Antisense oligomer
tgcctgtaagaacaaatatc

SEQ ID NO: 723 - DNA, 20 bp, Artificial sequence
  Antisense oligomer
attgttgcctgtaagaacaa

SEQ ID NO: 724 - DNA, 20 bp, Artificial sequence
  Antisense oligomer
cctgcattgttgcctgtaag

SEQ ID NO: 725 - DNA, 20 bp, Artificial sequence
  Antisense oligomer
caaatcctgcattgttgcct

SEQ ID NO: 726 - DNA, 20 bp, Artificial sequence
  Antisense oligomer
gcctctgttccaaatcctgc

SEQ ID NO: 727 - DNA, 20 bp, Artificial sequence
  Antisense oligomer
cttccaactggggacgcctc

SEQ ID NO: 728 - DNA, 20 bp, Artificial sequence
  Antisense oligomer
cagcggtaatgagttcttcc

SEQ ID NO: 729 - DNA, 20 bp, Artificial sequence
  Antisense oligomer
ttttcaaattttgggcagcg

SEQ ID NO: 730 - DNA, 20 bp, Artificial sequence
  Antisense oligomer
gattgctggtcttgtttttc

SEQ ID NO: 731 - DNA, 20 bp, Artificial sequence
  Antisense oligomer
ttgttctagcctcttgattg

SEQ ID NO: 732 - DNA, 20 bp, Artificial sequence
  Antisense oligomer
ttcgatccgtaatgattgtt

SEQ ID NO: 733 - DNA, 20 bp, Artificial sequence
  Antisense oligomer
cttacttcgatccgtaatga

SEQ ID NO: 734 - DNA, 20 bp, Artificial sequence
  Antisense oligomer
aaaaacttacttcgatccgt

SEQ ID NO: 735 - DNA, 20 bp, Artificial sequence
  Antisense oligomer
tgttaaaaaacttacttcga

SEQ ID NO: 736 - DNA, 20 bp, Artificial sequence
  Antisense oligomer
atgcttgttaaaaaacttac

SEQ ID NO: 737 - DNA, 20 bp, Artificial sequence
  Antisense oligomer
gtcccatgcttgttaaaaaa

SEQ ID NO: 738 - DNA, 25 bp, Artificial sequence
  Antisense oligomer
ctagaataaaaggaaaaataaatat

SEQ ID NO: 739 - DNA, 25 bp, Artificial sequence
  Antisense oligomer
aactagaataaaaggaaaaataaat

SEQ ID NO: 740 - DNA, 25 bp, Artificial sequence
  Antisense oligomer
ttcaactagaataaaaggaaaaata

SEQ ID NO: 741 - DNA, 25 bp, Artificial sequence
  Antisense oligomer
ctttcaactagaataaaaggaaaaa

SEQ ID NO: 742 - DNA, 25 bp, Artificial sequence
  Antisense oligomer
attctttcaactagaataaaaggaa

SEQ ID NO: 743 - DNA, 25 bp, Artificial sequence
  Antisense oligomer
gaattctttcaactagaataaaagg

SEQ ID NO: 744 - DNA, 25 bp, Artificial sequence
  Antisense oligomer
tctgaattctttcaactagaataaa

SEQ ID NO: 745 - DNA, 25 bp, Artificial sequence
  Antisense oligomer
attctgaattctttcaactagaata

SEQ ID NO: 746 - DNA, 25 bp, Artificial sequence
  Antisense oligomer
ctgattctgaattctttcaactaga

SEQ ID NO: 747 - DNA, 25 bp, Artificial sequence
  Antisense oligomer
cactgattctgaattctttcaacta

SEQ ID NO: 748 - DNA, 25 bp, Artificial sequence
  Antisense oligomer
tcccactgattctgaattctttcaa

SEQ ID NO: 749 - DNA, 25 bp, Artificial sequence
  Antisense oligomer
catcccactgattctgaattctttc

SEQ ID NO: 750 - DNA, 25 bp, Artificial sequence
  Antisense oligomer
tacttcatcccactgattctgaatt

SEQ ID NO: 751 - DNA, 24 bp, Artificial sequence
  Antisense oligomer
cggttctgaaggtgttcttgtact

SEQ ID NO: 752 - DNA, 25 bp, Artificial sequence
  Antisense oligomer
ctgttgcctccggttctgaaggtgt

SEQ ID NO: 753 - DNA, 25 bp, Artificial sequence
  Antisense oligomer
tttcattcaactgttgcctccggtt

SEQ ID NO: 754 - DNA, 25 bp, Artificial sequence
  Antisense oligomer
taacatttcattcaactgttgcctc

SEQ ID NO: 755 - DNA, 25 bp, Artificial sequence
  Antisense oligomer
ttgtgttgaatcctttaacatttca

SEQ ID NO: 756 - DNA, 25 bp, Artificial sequence
  Antisense oligomer
tcttccttagcttccagccattgtg

SEQ ID NO: 757 - DNA, 25 bp, Artificial sequence
  Antisense oligomer
cttagcttccagccattgtgttgaa

SEQ ID NO: 758 - DNA, 25 bp, Artificial sequence
  Antisense oligomer
gtcctaagacctgctcagcttcttc

SEQ ID NO: 759 - DNA, 25 bp, Artificial sequence
  Antisense oligomer
ctgctcagcttcttccttagcttcc

SEQ ID NO: 760 - DNA, 25 bp, Artificial sequence
  Antisense oligomer
ctcaagcttggctctggcctgtcct

SEQ ID NO: 761 - DNA, 25 bp, Artificial sequence
  Antisense oligomer
ggcctgtcctaagacctgctcagct

SEQ ID NO: 762 - DNA, 25 bp, Artificial sequence
  Antisense oligomer
tagggaccctccttccatgactcaa

SEQ ID NO: 763 - DNA, 25 bp, Artificial sequence
  Antisense oligomer
tttggattgcatctactgtataggg

SEQ ID NO: 764 - DNA, 25 bp, Artificial sequence
  Antisense oligomer
accctccttccatgactcaagcttg

SEQ ID NO: 765 - DNA, 25 bp, Artificial sequence
  Antisense oligomer
cttggtttctgtgattttcttttgg

SEQ ID NO: 766 - DNA, 25 bp, Artificial sequence
  Antisense oligomer
atctactgtatagggaccctccttc

SEQ ID NO: 767 - DNA, 25 bp, Artificial sequence
  Antisense oligomer
ctaaccttggtttctgtgattttct

SEQ ID NO: 768 - DNA, 25 bp, Artificial sequence
  Antisense oligomer
tttcttttggattgcatctactgta

SEQ ID NO: 769 - DNA, 25 bp, Artificial sequence
  Antisense oligomer
tgatactaaccttggtttctgtgat

SEQ ID NO: 770 - DNA, 25 bp, Artificial sequence
  Antisense oligomer
atctttgatactaaccttggtttct

SEQ ID NO: 771 - DNA, 25 bp, Artificial sequence
  Antisense oligomer
aaggtatctttgatactaaccttgg

SEQ ID NO: 772 - DNA, 25 bp, Artificial sequence
  Antisense oligomer
ttaaaaaggtatctttgatactaac

SEQ ID NO: 773 - DNA, 20 bp, Artificial sequence
  Antisense oligomer
ataaaaggaaaaataaatat

SEQ ID NO: 774 - DNA, 20 bp, Artificial sequence
  Antisense oligomer
gaataaaaggaaaaataaat

SEQ ID NO: 775 - DNA, 20 bp, Artificial sequence
  Antisense oligomer
aactagaataaaaggaaaaa

SEQ ID NO: 776 - DNA, 20 bp, Artificial sequence
  Antisense oligomer
ctttcaactagaataaaagg

SEQ ID NO: 777 - DNA, 20 bp, Artificial sequence
  Antisense oligomer
gaattctttcaactagaata

SEQ ID NO: 778 - DNA, 20 bp, Artificial sequence
  Antisense oligomer
attctgaattctttcaacta

SEQ ID NO: 779 - DNA, 20 bp, Artificial sequence
  Antisense oligomer
tacttcatcccactgattct

SEQ ID NO: 780 - DNA, 19 bp, Artificial sequence
  Antisense oligomer
ctgaaggtgttcttgtact

SEQ ID NO: 781 - DNA, 20 bp, Artificial sequence
  Antisense oligomer
ctgttgcctccggttctgaa

SEQ ID NO: 782 - DNA, 20 bp, Artificial sequence
  Antisense oligomer
taacatttcattcaactgtt

SEQ ID NO: 783 - DNA, 20 bp, Artificial sequence
  Antisense oligomer
ttgtgttgaatcctttaaca

SEQ ID NO: 784 - DNA, 20 bp, Artificial sequence
  Antisense oligomer
cttagcttccagccattgtg

SEQ ID NO: 785 - DNA, 20 bp, Artificial sequence
  Antisense oligomer
ctgctcagcttcttccttag

SEQ ID NO: 786 - DNA, 20 bp, Artificial sequence
  Antisense oligomer
ggcctgtcctaagacctgct

SEQ ID NO: 787 - DNA, 20 bp, Artificial sequence
  Antisense oligomer
ctcaagcttggctctggcct

SEQ ID NO: 788 - DNA, 20 bp, Artificial sequence
  Antisense oligomer
accctccttccatgactcaa

SEQ ID NO: 789 - DNA, 20 bp, Artificial sequence
  Antisense oligomer
atctactgtatagggaccct

SEQ ID NO: 790 - DNA, 20 bp, Artificial sequence
  Antisense oligomer
tttcttttggattgcatcta

SEQ ID NO: 791 - DNA, 20 bp, Artificial sequence
  Antisense oligomer
cttggtttctgtgattttct

SEQ ID NO: 792 - DNA, 20 bp, Artificial sequence
  Antisense oligomer
ctaaccttggtttctgtgat

SEQ ID NO: 793 - DNA, 20 bp, Artificial sequence
  Antisense oligomer
tgatactaaccttggtttct

SEQ ID NO: 794 - DNA, 20 bp, Artificial sequence
  Antisense oligomer
atctttgatactaaccttgg

SEQ ID NO: 795 - DNA, 20 bp, Artificial sequence
  Antisense oligomer
aaggtatctttgatactaac

SEQ ID NO: 796 - DNA, 20 bp, Artificial sequence
  Antisense oligomer
ttaaaaaggtatctttgata

SEQ ID NO: 797 - DNA, 24 bp, Artificial sequence
  Antisense oligomer
ctatagatttttatgagaaagaga

SEQ ID NO: 798 - DNA, 25 bp, Artificial sequence
  Antisense oligomer
aactgctatagatttttatgagaaa

SEQ ID NO: 799 - DNA, 25 bp, Artificial sequence
  Antisense oligomer
tggccaactgctatagatttttatg

SEQ ID NO: 800 - DNA, 25 bp, Artificial sequence
  Antisense oligomer
gtctttggccaactgctatagattt

SEQ ID NO: 801 - DNA, 25 bp, Artificial sequence
  Antisense oligomer
cggaggtctttggccaactgctata

SEQ ID NO: 802 - DNA, 25 bp, Artificial sequence
  Antisense oligomer
actggcggaggtctttggccaactg

SEQ ID NO: 803 - DNA, 25 bp, Artificial sequence
  Antisense oligomer
tttgtctgccactggcggaggtctt

SEQ ID NO: 804 - DNA, 25 bp, Artificial sequence
  Antisense oligomer
agtcatttgccacatctacatttgt

SEQ ID NO: 805 - DNA, 25 bp, Artificial sequence
  Antisense oligomer
tttgccacatctacatttgtctgcc

SEQ ID NO: 806 - DNA, 25 bp, Artificial sequence
  Antisense oligomer
ccggagaagtttcagggccaagtca

SEQ ID NO: 807 - DNA, 25 bp, Artificial sequence
  Antisense oligomer
gtatcatctgcagaataatcccgga

SEQ ID NO: 808 - DNA, 25 bp, Artificial sequence
  Antisense oligomer
taatcccggagaagtttcagggcca

SEQ ID NO: 809 - DNA, 25 bp, Artificial sequence
  Antisense oligomer
ttatcatgtggacttttctggtatc

SEQ ID NO: 810 - DNA, 25 bp, Artificial sequence
  Antisense oligomer
agaggcattgatattctctgttatc

SEQ ID NO: 811 - DNA, 25 bp, Artificial sequence
  Antisense oligomer
atgtggacttttctggtatcatctg

SEQ ID NO: 812 - DNA, 25 bp, Artificial sequence
  Antisense oligomer
cttttatgaatgcttctccaagagg

SEQ ID NO: 813 - DNA, 25 bp, Artificial sequence
  Antisense oligomer
atattctctgttatcatgtggactt

SEQ ID NO: 814 - DNA, 25 bp, Artificial sequence
  Antisense oligomer
cataccttttatgaatgcttctcca

SEQ ID NO: 815 - DNA, 25 bp, Artificial sequence
  Antisense oligomer
ctccaagaggcattgatattctctg

SEQ ID NO: 816 - DNA, 25 bp, Artificial sequence
  Antisense oligomer
taattcataccttttatgaatgctt

SEQ ID NO: 817 - DNA, 25 bp, Artificial sequence
  Antisense oligomer
taatgtaattcataccttttatgaa

SEQ ID NO: 818 - DNA, 25 bp, Artificial sequence
  Antisense oligomer
agaaataatgtaattcatacctttt

SEQ ID NO: 819 - DNA, 25 bp, Artificial sequence
  Antisense oligomer
gttttagaaataatgtaattcatac

SEQ ID NO: 820 - DNA, 19 bp, Artificial sequence
  Antisense oligomer
gatttttatgagaaagaga

SEQ ID NO: 821 - DNA, 20 bp, Artificial sequence
  Antisense oligomer
ctatagatttttatgagaaa

SEQ ID NO: 822 - DNA, 20 bp, Artificial sequence
  Antisense oligomer
aactgctatagatttttatg

SEQ ID NO: 823 - DNA, 20 bp, Artificial sequence
  Antisense oligomer
tggccaactgctatagattt

SEQ ID NO: 824 - DNA, 20 bp, Artificial sequence
  Antisense oligomer
gtctttggccaactgctata

SEQ ID NO: 825 - DNA, 20 bp, Artificial sequence
  Antisense oligomer
cggaggtctttggccaactg

SEQ ID NO: 826 - DNA, 20 bp, Artificial sequence
  Antisense oligomer
tttgtctgccactggcggag

SEQ ID NO: 827 - DNA, 20 bp, Artificial sequence
  Antisense oligomer
tttgccacatctacatttgt

SEQ ID NO: 828 - DNA, 20 bp, Artificial sequence
  Antisense oligomer
ttcagggccaagtcatttgc

SEQ ID NO: 829 - DNA, 20 bp, Artificial sequence
  Antisense oligomer
taatcccggagaagtttcag

SEQ ID NO: 830 - DNA, 20 bp, Artificial sequence
  Antisense oligomer
gtatcatctgcagaataatc

SEQ ID NO: 831 - DNA, 20 bp, Artificial sequence
  Antisense oligomer
atgtggacttttctggtatc

SEQ ID NO: 832 - DNA, 20 bp, Artificial sequence
  Antisense oligomer
atattctctgttatcatgtg

SEQ ID NO: 833 - DNA, 20 bp, Artificial sequence
  Antisense oligomer
ctccaagaggcattgatatt

SEQ ID NO: 834 - DNA, 20 bp, Artificial sequence
  Antisense oligomer
cttttatgaatgcttctcca

SEQ ID NO: 835 - DNA, 20 bp, Artificial sequence
  Antisense oligomer
cataccttttatgaatgctt

SEQ ID NO: 836 - DNA, 20 bp, Artificial sequence
  Antisense oligomer
taattcataccttttatgaa

SEQ ID NO: 837 - DNA, 20 bp, Artificial sequence
  Antisense oligomer
taatgtaattcatacctttt

SEQ ID NO: 838 - DNA, 20 bp, Artificial sequence
  Antisense oligomer
agaaataatgtaattcatac

SEQ ID NO: 839 - DNA, 20 bp, Artificial sequence
  Antisense oligomer
gttttagaaataatgtaatt

SEQ ID NO: 840 - DNA, 25 bp, Artificial sequence
  Antisense oligomer
ctgcaaaggaccaaatgttcagatg

SEQ ID NO: 841 - DNA, 25 bp, Artificial sequence
  Antisense oligomer
tcaccctgcaaaggaccaaatgttc

SEQ ID NO: 842 - DNA, 25 bp, Artificial sequence
  Antisense oligomer
ctcactcaccctgcaaaggaccaaa

SEQ ID NO: 843 - DNA, 25 bp, Artificial sequence
  Antisense oligomer
tctcgctcactcaccctgcaaagga

SEQ ID NO: 844 - DNA, 25 bp, Artificial sequence
  Antisense oligomer
cagcctctcgctcactcaccctgca

SEQ ID NO: 845 - DNA, 25 bp, Artificial sequence
  Antisense oligomer
caaagcagcctctcgctcactcacc

SEQ ID NO: 846 - DNA, 25 bp, Artificial sequence
  Antisense oligomer
tcttccaaagcagcctctcgctcac

SEQ ID NO: 847 - DNA, 25 bp, Artificial sequence
  Antisense oligomer
tctatgagtttcttccaaagcagcc

SEQ ID NO: 848 - DNA, 25 bp, Artificial sequence
  Antisense oligomer
gttgcagtaatctatgagtttcttc

SEQ ID NO: 849 - DNA, 25 bp, Artificial sequence
  Antisense oligomer
gaactgttgcagtaatctatgagtt

SEQ ID NO: 850 - DNA, 25 bp, Artificial sequence
  Antisense oligomer
ttccaggtccagggggaactgttgc

SEQ ID NO: 851 - DNA, 25 bp, Artificial sequence
  Antisense oligomer
gtaagccaggcaagaaacttttcca

SEQ ID NO: 852 - DNA, 25 bp, Artificial sequence
  Antisense oligomer
ccaggcaagaaacttttccaggtcc

SEQ ID NO: 853 - DNA, 25 bp, Artificial sequence
  Antisense oligomer
tggcagttgtttcagcttctgtaag

SEQ ID NO: 854 - DNA, 25 bp, Artificial sequence
  Antisense oligomer
ttcagcttctgtaagccaggcaaga

SEQ ID NO: 855 - DNA, 25 bp, Artificial sequence
  Antisense oligomer
ggtagcatcctgtaggacattggca

SEQ ID NO: 856 - DNA, 25 bp, Artificial sequence
  Antisense oligomer
gacattggcagttgtttcagcttct

SEQ ID NO: 857 - DNA, 25 bp, Artificial sequence
  Antisense oligomer
tctaggagcctttccttacgggtag

SEQ ID NO: 858 - DNA, 25 bp, Artificial sequence
  Antisense oligomer
cttttactcccttggagtcttctag

SEQ ID NO: 859 - DNA, 25 bp, Artificial sequence
  Antisense oligomer
gagcctttccttacgggtagcatcc

SEQ ID NO: 860 - DNA, 25 bp, Artificial sequence
  Antisense oligomer
ttgccattgtttcatcagctctttt

SEQ ID NO: 861 - DNA, 25 bp, Artificial sequence
  Antisense oligomer
cttggagtcttctaggagcctttcc

SEQ ID NO: 862 - DNA, 25 bp, Artificial sequence
  Antisense oligomer
cttacttgccattgtttcatcagct

SEQ ID NO: 863 - DNA, 25 bp, Artificial sequence
  Antisense oligomer
cagctcttttactcccttggagtct

SEQ ID NO: 864 - DNA, 25 bp, Artificial sequence
  Antisense oligomer
cctgacttacttgccattgtttcat

SEQ ID NO: 865 - DNA, 25 bp, Artificial sequence
  Antisense oligomer
aaatgcctgacttacttgccattgt

SEQ ID NO: 866 - DNA, 25 bp, Artificial sequence
  Antisense oligomer
agcggaaatgcctgacttacttgcc

SEQ ID NO: 867 - DNA, 25 bp, Artificial sequence
  Antisense oligomer
gctaaagcggaaatgcctgacttac

SEQ ID NO: 868 - DNA, 20 bp, Artificial sequence
  Antisense oligomer
aaggaccaaatgttcagatg

SEQ ID NO: 869 - DNA, 20 bp, Artificial sequence
  Antisense oligomer
ctgcaaaggaccaaatgttc

SEQ ID NO: 870 - DNA, 20 bp, Artificial sequence
  Antisense oligomer
tcaccctgcaaaggaccaaa

SEQ ID NO: 871 - DNA, 20 bp, Artificial sequence
  Antisense oligomer
ctcactcaccctgcaaagga

SEQ ID NO: 872 - DNA, 20 bp, Artificial sequence
  Antisense oligomer
tctcgctcactcaccctgca

SEQ ID NO: 873 - DNA, 20 bp, Artificial sequence
  Antisense oligomer
cagcctctcgctcactcacc

SEQ ID NO: 874 - DNA, 20 bp, Artificial sequence
  Antisense oligomer
caaagcagcctctcgctcac

SEQ ID NO: 875 - DNA, 20 bp, Artificial sequence
  Antisense oligomer
tctatgagtttcttccaaag

SEQ ID NO: 876 - DNA, 20 bp, Artificial sequence
  Antisense oligomer
gaactgttgcagtaatctat

SEQ ID NO: 877 - DNA, 20 bp, Artificial sequence
  Antisense oligomer
ttccaggtccagggggaact

SEQ ID NO: 878 - DNA, 20 bp, Artificial sequence
  Antisense oligomer
ccaggcaagaaacttttcca

SEQ ID NO: 879 - DNA, 20 bp, Artificial sequence
  Antisense oligomer
ttcagcttctgtaagccagg

SEQ ID NO: 880 - DNA, 20 bp, Artificial sequence
  Antisense oligomer
gacattggcagttgtttcag

SEQ ID NO: 881 - DNA, 20 bp, Artificial sequence
  Antisense oligomer
ggtagcatcctgtaggacat

SEQ ID NO: 882 - DNA, 20 bp, Artificial sequence
  Antisense oligomer
gagcctttccttacgggtag

SEQ ID NO: 883 - DNA, 20 bp, Artificial sequence
  Antisense oligomer
cttggagtcttctaggagcc

SEQ ID NO: 884 - DNA, 20 bp, Artificial sequence
  Antisense oligomer
cagctcttttactcccttgg

SEQ ID NO: 885 - DNA, 20 bp, Artificial sequence
  Antisense oligomer
ttgccattgtttcatcagct

SEQ ID NO: 886 - DNA, 20 bp, Artificial sequence
  Antisense oligomer
cttacttgccattgtttcat

SEQ ID NO: 887 - DNA, 20 bp, Artificial sequence
  Antisense oligomer
cctgacttacttgccattgt

SEQ ID NO: 888 - DNA, 20 bp, Artificial sequence
  Antisense oligomer
aaatgcctgacttacttgcc

SEQ ID NO: 889 - DNA, 20 bp, Artificial sequence
  Antisense oligomer
agcggaaatgcctgacttac

SEQ ID NO: 890 - DNA, 20 bp, Artificial sequence
  Antisense oligomer
gctaaagcggaaatgcctga

SEQ ID NO: 891 - DNA, 29 bp, Artificial sequence
  Antisense oligomer
ccactcagagctcagatcttctaacttcc

SEQ ID NO: 892 - DNA, 25 bp, Artificial sequence
  Antisense oligomer
gggatccagtatacttacaggctcc

SEQ ID NO: 893 - DNA, 27 bp, Artificial sequence
  Antisense oligomer
cttccactcagagctcagatcttctaa

SEQ ID NO: 894 - DNA, 30 bp, Artificial sequence
  Antisense oligomer
acatcaaggaagatggcatttctagtttgg

SEQ ID NO: 895 - DNA, 30 bp, Artificial sequence; identical to SEQ ID NO: 76
  Antisense oligomer

SEQ ID NO: 896 - DNA, 24 bp, Artificial sequence
  Antisense oligomer
ttctgtccaagcccggttgaaatc

SEQ ID NO: 897 - DNA, 21 bp, Artificial sequence
  Antisense oligomer
cacccaccatcaccctcygtg

SEQ ID NO: 898 - DNA, 22 bp, Artificial sequence
  Antisense oligomer
atcatctcgttgatatcctcaa

SEQ ID NO: 899 - DNA, 25 bp, Artificial sequence
  Antisense oligomer
acatcaaggaagatggcatttctag

SEQ ID NO: 900 - DNA, 26 bp, Artificial sequence
  Antisense oligomer
accagagtaacagtctgagtaggagc

SEQ ID NO: 901 - DNA, 20 bp, Artificial sequence
  Antisense oligomer
tcaaggaagatggcatttct

SEQ ID NO: 902 - DNA, 23 bp, Artificial sequence
  Antisense oligomer
cctctgtgattttataacttgat

SEQ ID NO: 903 - DNA, 25 bp, Artificial sequence
  Antisense oligomer
atcattttttctcataccttctgct

SEQ ID NO: 904 - DNA, 23 bp, Artificial sequence
  Antisense oligomer
ctcataccttctgcttgatgatc

SEQ ID NO: 905 - DNA, 17 bp, Artificial sequence
  Antisense oligomer
tggcatttctagtttgg

SEQ ID NO: 906 - DNA, 23 bp, Artificial sequence
  Antisense oligomer
ccagagcaggtacctccaacatc

SEQ ID NO: 907 - DNA, 19 bp, Artificial sequence
  Antisense oligomer
cgccgccatttctcaacag

SEQ ID NO: 908 - DNA, 20 bp, Artificial sequence
  Antisense oligomer
tgtttttgaggattgctgaa

SEQ ID NO: 909 - DNA, 19 bp, Artificial sequence
  Antisense oligomer
gctgaattatttcttcccc

SEQ ID NO: 910 - DNA, 17 bp, Artificial sequence
  Antisense oligomer
gcccaatgccatcctgg

SEQ ID NO: 911 - DNA, 26 bp, Artificial sequence
  Antisense oligomer
ccaatgccatcctggagttcctgtaa

SEQ ID NO: 912 - DNA, 31 bp, Artificial sequence
  Antisense oligomer
cattcaactgttgcctccggttctgaaggtg

SEQ ID NO: 913 - DNA, 18 bp, Artificial sequence
  Antisense oligomer
ctgttgcctccggttctg

SEQ ID NO: 914 - DNA, 22 bp, Artificial sequence
  Antisense oligomer
attctttcaactagaataaaag

SEQ ID NO: 915 - DNA, 30 bp, Artificial sequence
  Antisense oligomer
gccatcctggagttcctgtaagataccaaa

SEQ ID NO: 916 - DNA, 30 bp, Artificial sequence
  Antisense oligomer
ccaatgccatcctggagttcctgtaagata

SEQ ID NO: 917 - DNA, 30 bp, Artificial sequence
  Antisense oligomer
gccgctgcccaatgccatcctggagttcct

SEQ ID NO: 918 - DNA, 30 bp, Artificial sequence
  Antisense oligomer
gtttgccgctgcccaatgccatcctggagt

SEQ ID NO: 919 - DNA, 30 bp, Artificial sequence
  Antisense oligomer
caacagtttgccgctgcccaatgccatcct

SEQ ID NO: 920 - DNA, 30 bp, Artificial sequence
  Antisense oligomer
ctgacaacagtttgccgctgcccaatgcca

SEQ ID NO: 921 - DNA, 30 bp, Artificial sequence
  Antisense oligomer
tgttctgacaacagtttgccgctgcccaat

SEQ ID NO: 922 - DNA, 30 bp, Artificial sequence
  Antisense oligomer
caatgttctgacaacagtttgccgctgccc

SEQ ID NO: 923 - DNA, 30 bp, Artificial sequence
  Antisense oligomer
cattcaatgttctgacaacagtttgccgct

SEQ ID NO: 924 - DNA, 30 bp, Artificial sequence
  Antisense oligomer
tatttcttccccagttgcattcaatgttct

SEQ ID NO: 925 - DNA, 30 bp, Artificial sequence
  Antisense oligomer
gctgaattatttcttccccagttgcattca

SEQ ID NO: 926 - DNA, 30 bp, Artificial sequence
  Antisense oligomer
ggattgctgaattatttcttccccagttgc

SEQ ID NO: 927 - DNA, 30 bp, Artificial sequence
  Antisense oligomer
tttgaggattgctgaattatttcttcccca

SEQ ID NO: 928 - DNA, 30 bp, Artificial sequence
  Antisense oligomer
gtacttcatcccactgattctgaattcttt

SEQ ID NO: 929 - DNA, 30 bp, Artificial sequence
  Antisense oligomer
tcttgtacttcatcccactgattctgaatt

SEQ ID NO: 930 - DNA, 30 bp, Artificial sequence
  Antisense oligomer
tgttcttgtacttcatcccactgattctga

SEQ ID NO: 931 - DNA, 30 bp, Artificial sequence
  Antisense oligomer
cggttctgaaggtgttcttgtacttcatcc

SEQ ID NO: 932 - DNA, 30 bp, Artificial sequence
  Antisense oligomer
ctccggttctgaaggtgttcttgtacttca

SEQ ID NO: 933 - DNA, 30 bp, Artificial sequence
  Antisense oligomer
tgcctccggttctgaaggtgttcttgtact

SEQ ID NO: 934 - DNA, 30 bp, Artificial sequence
  Antisense oligomer
tgttgcctccggttctgaaggtgttcttgt

SEQ ID NO: 935 - DNA, 30 bp, Artificial sequence
  Antisense oligomer
aactgttgcctccggttctgaaggtgttct

SEQ ID NO: 936 - DNA, 30 bp, Artificial sequence
  Antisense oligomer
ttcaactgttgcctccggttctgaaggtgt

SEQ ID NO: 937 - DNA, 25 bp, Artificial sequence
  Antisense oligomer
ggccaaacctcggcttacctgaaat

SEQ ID NO: 938 - DNA, 24 bp, Artificial sequence
  Antisense oligomer
cagatctgtcaaatcgcctgcagg

SEQ ID NO: 939 - DNA, 27 bp, Artificial sequence
  Antisense oligomer
caacagatctgtcaaatcgcctgcagg

SEQ ID NO: 940 - DNA, 29 bp, Artificial sequence
  Antisense oligomer
ctcaacagatctgtcaaatcgcctgcagg

SEQ ID NO: 941 - DNA, 25 bp, Artificial sequence
  Antisense oligomer
gtgtctttctgagaaactgttcagc

SEQ ID NO: 942 - DNA, 28 bp, Artificial sequence
  Antisense oligomer
gagaaactgttcagcttctgttagccac

SEQ ID NO: 943 - DNA, 28 bp, Artificial sequence
  Antisense oligomer
gaaactgttcagcttctgttagccactg

SEQ ID NO: 944 - DNA, 24 bp, Artificial sequence
  Antisense oligomer
ctgttcagcttctgttagccactg

SEQ ID NO: 945 - DNA, 20 bp, Artificial sequence
  Antisense oligomer
atctgtcaaatcgcctgcag

SEQ ID NO: 946 - DNA, 20 bp, Artificial sequence
  Antisense oligomer
tttgtgtctttctgagaaac

SEQ ID NO: 947 - DNA, 24 bp, Artificial sequence
  Antisense oligomer
tgttcagcttctgttagccactga

SEQ ID NO: 948 - DNA, 25 bp, Artificial sequence
  Antisense oligomer
gatctgtcaaatcgcctgcaggtaa

SEQ ID NO: 949 - DNA, 25 bp, Artificial sequence
  Antisense oligomer
aaactgttcagcttctgttagccac

SEQ ID NO: 950 - DNA, 25 bp, Artificial sequence
  Antisense oligomer
ttgtgtctttctgagaaactgttca

SEQ ID NO: 951 - DNA, 26 bp, Artificial sequence
  Antisense oligomer
caacagatctgtcaaatcgcctgcag

SEQ ID NO: 952 - DNA, 26 bp, Artificial sequence
  Antisense oligomer
cagatctgtcaaatcgcctgcaggta

SEQ ID NO: 953 - DNA, 27 bp, Artificial sequence
  Antisense oligomer
ctgttcagcttctgttagccactgatt

SEQ ID NO: 954 - DNA, 31 bp, Artificial sequence; identical to SEQ ID NO: 324
  Antisense oligomer

SEQ ID NO: 955 - DNA, 26 bp, Artificial sequence
  Antisense oligomer
agaaactgttcagcttctgttagcca

SEQ ID NO: 956 - DNA, 23 bp, Artificial sequence
  Antisense oligomer
cttggacagaacttaccgactgg

SEQ ID NO: 957 - DNA, 23 bp, Artificial sequence
  Antisense oligomer
gtttcttccaaagcagcctctcg

SEQ ID NO: 958 - DNA, 21 bp, Artificial sequence
  Antisense oligomer
gcaggatttggaacagaggcg

SEQ ID NO: 959 - DNA, 23 bp, Artificial sequence
  Antisense oligomer
catctacatttgtctgccactgg

SEQ ID NO: 960 - DNA, 21 bp, Artificial sequence
  Antisense oligomer
caatgctcctgacctctgtgc

SEQ ID NO: 961 - DNA, 22 bp, Artificial sequence
  Antisense oligomer
gctcttttccaggttcaagtgg

SEQ ID NO: 962 - DNA, 22 bp, Artificial sequence
  Antisense oligomer
gtctacaacaaagctcaggtcg

SEQ ID NO: 963 - DNA, 25 bp, Artificial sequence
  Antisense oligomer
gcaatgttatctgcttcctccaacc

SEQ ID NO: 964 - DNA, 28 bp, Artificial sequence
  Antisense oligomer
gctttgttgtagactatcttttatattc

SEQ ID NO: 965 - DNA, 28 bp, Artificial sequence
  Antisense oligomer
ccgacctgagctttgttgtagactatct

SEQ ID NO: 966 - DNA, 28 bp, Artificial sequence
  Antisense oligomer
cttcctgtagcttcaccctttccacagg

SEQ ID NO: 967 - DNA, 28 bp, Artificial sequence
  Antisense oligomer
gctgggagagagcttcctgtagcttcac

SEQ ID NO: 968 - DNA, 28 bp, Artificial sequence
  Antisense oligomer
tgttacctacccttgtcggtccttgtac

SEQ ID NO: 969 - DNA, 28 bp, Artificial sequence
  Antisense oligomer
ctatgaataatgtcaatccgacctgagc

SEQ ID NO: 970 - DNA, 28 bp, Artificial sequence
  Antisense oligomer
ctgctgtcttcttgctatgaataatgtc

SEQ ID NO: 971 - DNA, 28 bp, Artificial sequence
  Antisense oligomer
ggcgttgcactttgcaatgctgctgtct

SEQ ID NO: 972 - DNA, 28 bp, Artificial sequence
  Antisense oligomer
ttggaaatcaagctgggagagagcttcc

SEQ ID NO: 973 - DNA, 28 bp, Artificial sequence
  Antisense oligomer
ctttttcccattggaaatcaagctggga

SEQ ID NO: 974 - DNA, 28 bp, Artificial sequence
  Antisense oligomer
gtcggtccttgtacattttgttaacttt

SEQ ID NO: 975 - DNA, 28 bp, Artificial sequence
  Antisense oligomer
ctacccttgtcggtccttgtacattttg

SEQ ID NO: 976 - DNA, 28 bp, Artificial sequence
  Antisense oligomer
gacctgagctttgttgtagactatcttt

SEQ ID NO: 977 - DNA, 28 bp, Artificial sequence
  Antisense oligomer
gtcaatccgacctgagctttgttgtaga

SEQ ID NO: 978 - DNA, 28 bp, Artificial sequence
  Antisense oligomer
taatgtcaatccgacctgagctttgttg

SEQ ID NO: 979 - DNA, 27 bp, Artificial sequence
  Antisense oligomer
cttgctatgaataatgtcaatccgacc

SEQ ID NO: 980 - DNA, 28 bp, Artificial sequence
  Antisense oligomer
gtcttcttgctatgaataatgtcaatcc

SEQ ID NO: 981 - DNA, 28 bp, Artificial sequence
  Antisense oligomer
gcactttgcaatgctgctgtcttcttgc

SEQ ID NO: 982 - DNA, 28 bp, Artificial sequence
  Antisense oligomer
ccacaggcgttgcactttgcaatgctgc

SEQ ID NO: 983 - DNA, 28 bp, Artificial sequence
  Antisense oligomer
agcttcaccctttccacaggcgttgcac

SEQ ID NO: 984 - DNA, 23 bp, Artificial sequence
  Antisense oligomer
tcaccctttccacaggcgttgca

SEQ ID NO: 985 - DNA, 20 bp, Artificial sequence
  Antisense oligomer
ggagagagcttcctgtagct

SEQ ID NO: 986 - DNA, 28 bp, Artificial sequence
  Antisense oligomer
tcccattggaaatcaagctgggagagag

SEQ ID NO: 987 - DNA, 28 bp, Artificial sequence
  Antisense oligomer
tatatgtgttacctacccttgtcggtcc

SEQ ID NO: 988 - DNA, 27 bp, Artificial sequence
  Antisense oligomer
gccatcctggagttcctgtaagatacc

SEQ ID NO: 989 - DNA, 25 bp, Artificial sequence
  Antisense oligomer
gagttcctgtaagataccaaaaagg

SEQ ID NO: 990 - DNA, 25 bp, Artificial sequence
  Antisense oligomer
gcccaatgccatcctggagttcctg

SEQ ID NO: 991 - DNA, 22 bp, Artificial sequence
  Antisense oligomer
ccaatgccatcctggagttcct

SEQ ID NO: 992 - DNA, 24 bp, Artificial sequence
  Antisense oligomer
aatgccatcctggagttcctgtaa

SEQ ID NO: 993 - DNA, 25 bp, Artificial sequence
  Antisense oligomer
cctggagttcctgtaagataccaaa

SEQ ID NO: 994 - DNA, 25 bp, Artificial sequence
  Antisense oligomer
tgccatcctggagttcctgtaagat

SEQ ID NO: 995 - DNA, 22 bp, Artificial sequence
  Antisense oligomer
tcctggagttcctgtaagatac

SEQ ID NO: 996 - DNA, 25 bp, Artificial sequence
  Antisense oligomer
ccatcctggagttcctgtaagatac

SEQ ID NO: 997 - DNA, 29 bp, Artificial sequence
  Antisense oligomer
cccaatgccatcctggagttcctgtaaga

SEQ ID NO: 998 - DNA, 28 bp, Artificial sequence
  Antisense oligomer
ccgctgcccaatgccatcctggagttcc

SEQ ID NO: 999 - DNA, 30 bp, Artificial sequence
  Antisense oligomer
caatgccatcctggagttcctgtaagatac

SEQ ID NO: 1000 - DNA, 30 bp, Artificial sequence
  Antisense oligomer
cccaatgccatcctggagttcctgtaagat

SEQ ID NO: 1001 - DNA, 30 bp, Artificial sequence; identical to SEQ ID NO: 917
  Antisense oligomer

SEQ ID NO: 1002 - DNA, 30 bp, Artificial sequence
  Antisense oligomer
aatgccatcctggagttcctgtaagatacc

SEQ ID NO: 1003 - DNA, 30 bp, Artificial sequence
  Antisense oligomer
ccgctgcccaatgccatcctggagttcctg

SEQ ID NO: 1004 - DNA, 30 bp, Artificial sequence
  Antisense oligomer
tgccgctgcccaatgccatcctggagttcc

SEQ ID NO: 1005 - DNA, 30 bp, Artificial sequence
  Antisense oligomer
tgcccaatgccatcctggagttcctgtaag

SEQ ID NO: 1006 - DNA, 28 bp, Artificial sequence
  Antisense oligomer
caatgccatcctggagttcctgtaagat

SEQ ID NO: 1007 - DNA, 28 bp, Artificial sequence
  Antisense oligomer
cccaatgccatcctggagttcctgtaag

SEQ ID NO: 1008 - DNA, 28 bp, Artificial sequence
  Antisense oligomer
tgcccaatgccatcctggagttcctgta

SEQ ID NO: 1009 - DNA, 28 bp, Artificial sequence
  Antisense oligomer
gctgcccaatgccatcctggagttcctg

SEQ ID NO: 1010 - DNA, 25 bp, Artificial sequence
  Antisense oligomer
catcctggagttcctgtaagatacc

SEQ ID NO: 1011 - DNA, 27 bp, Artificial sequence
  Antisense oligomer
gccatcctggagttcctgtaagatacc

SEQ ID NO: 1012 - DNA, 25 bp, Artificial sequence
  Antisense oligomer
gctgcccaatgccatcctggagttc

SEQ ID NO: 1013 - DNA, 20 bp, Artificial sequence
  Antisense oligomer
gcccaatgccatcctggagt

SEQ ID NO: 1014 - DNA, 25 bp, Artificial sequence
  Antisense oligomer
tgccgctgcccaatgccatcctgga

SEQ ID NO: 1015 - DNA, 19 bp, Artificial sequence
  Antisense oligomer
ctgcccaatgccatcctgg

SEQ ID NO: 1016 - DNA, 26 bp, Artificial sequence
  Antisense oligomer
cagtttgccgctgcccaatgccatcc

SEQ ID NO: 1017 - DNA, 24 bp, Artificial sequence
  Antisense oligomer
acagtttgccgctgcccaatgcca

SEQ ID NO: 1018 - DNA, 25 bp, Artificial sequence
  Antisense oligomer
ctgacaacagtttgccgctgcccaa

SEQ ID NO: 1019 - DNA, 20 bp, Artificial sequence
  Antisense oligomer
gcattcaatgttctgacaac

SEQ ID NO: 1020 - DNA, 30 bp, Artificial sequence
  Antisense oligomer
gaattatttcttccccagttgcattcaatg

SEQ ID NO: 1021 - DNA, 30 bp, Artificial sequence
  Antisense oligomer
ctggcatctgtttttgaggattgctgaatt

SEQ ID NO: 1022 - DNA, 26 bp, Artificial sequence
  Antisense oligomer
ccagttgcattcaatgttctgacaac

SEQ ID NO: 1023 - DNA, 23 bp, Artificial sequence
  Antisense oligomer
ttgctgaattatttcttccccag

SEQ ID NO: 1024 - DNA, 29 bp, Artificial sequence
  Antisense oligomer
tttttgaggattgctgaattatttcttcc

SEQ ID NO: 1025 - DNA, 25 bp, Artificial sequence
  Antisense oligomer
tttcctgtagaatactggcatctgt

SEQ ID NO: 1026 - DNA, 31 bp, Artificial sequence
  Antisense oligomer
cttcccaatttttcctgtagaatactggcat

SEQ ID NO: 1027 - DNA, 25 bp, Artificial sequence
  Antisense oligomer
ccaatttttcctgtagaatactggc

SEQ ID NO: 1028 - DNA, 29 bp, Artificial sequence
  Antisense oligomer
caggcttcccaatttttcctgtagaatac

SEQ ID NO: 1029 - DNA, 26 bp, Artificial sequence
  Antisense oligomer
ctcctgccaccgcagattcaggcttc

SEQ ID NO: 1030 - DNA, 25 bp, Artificial sequence
  Antisense oligomer
gcagacctcctgccaccgcagattc

SEQ ID NO: 1031 - DNA, 31 bp, Artificial sequence
  Antisense oligomer
ttgtttgcagacctcctgccaccgcagattc

SEQ ID NO: 1032 - DNA, 24 bp, Artificial sequence
  Antisense oligomer
gctgtttgcagacctcctgccacc

SEQ ID NO: 1033 - DNA, 25 bp, Artificial sequence
  Antisense oligomer
gtttgcagacctcctgccaccgcag

SEQ ID NO: 1034 - DNA, 30 bp, Artificial sequence
  Antisense oligomer
cttttttctgtctgacagctgtttgcagac

SEQ ID NO: 1035 - DNA, 21 bp, Artificial sequence
  Antisense oligomer
ctgtctgacagctgtttgcag

SEQ ID NO: 1036 - DNA, 25 bp, Artificial sequence
  Antisense oligomer
ctacctcttttttctgtctgacagc

SEQ ID NO: 1037 - DNA, 25 bp, Artificial sequence
  Antisense oligomer
tattagatctgtcgccctacctctt

SEQ ID NO: 1038 - DNA, 25 bp, Artificial sequence
  Antisense oligomer
cctattagatctgtcgccctacctc

SEQ ID NO: 1039 - DNA, 19 bp, Artificial sequence
  Antisense oligomer
cuuuaacagaaaagcauac

SEQ ID NO: 1040 - DNA, 20 bp, Artificial sequence
  Antisense oligomer
ucuuuaacagaaaagcauac

SEQ ID NO: 1041 - DNA, 22 bp, Artificial sequence
  Antisense oligomer
ccucuuuaacagaaaagcauac

SEQ ID NO: 1042 - DNA, 27 bp, Artificial sequence
  Antisense oligomer
aacuuccucuuuaacagaaaagcauac

SEQ ID NO: 1043 - DNA, 32 bp, Artificial sequence
  Antisense oligomer
cuucuaacuuccucuuuaacagaaaagcauac

SEQ ID NO: 1044 - DNA, 16 bp, Artificial sequence
  Antisense oligomer
ccucuuuaacagaaaa

SEQ ID NO: 1045 - DNA, 22 bp, Artificial sequence
  Antisense oligomer
aacuuccucuuuaacagaaaag

SEQ ID NO: 1046 - DNA, 17 bp, Artificial sequence
  Antisense oligomer
aacuuccucuuuaacag

SEQ ID NO: 1047 - DNA, 30 bp, Artificial sequence
  Antisense oligomer
gcucagaucuucuaacuuccucuuuaacag

SEQ ID NO: 1048 - DNA, 16 bp, Artificial sequence
  Antisense oligomer
aacuuccucuuuaaca

SEQ ID NO: 1049 - DNA, 29 bp, Artificial sequence
  Antisense oligomer
ccacucagagcucagaucuucuaacuucc

SEQ ID NO: 1050 - DNA, 17 bp, Artificial sequence
  Antisense oligomer
cucagagcucagaucuu

SEQ ID NO: 1051 - DNA, 17 bp, Artificial sequence
  Antisense oligomer
gcucuugaaguaaacgg

SEQ ID NO: 1052 - DNA, 18 bp, Artificial sequence
  Antisense oligomer
aauaguggucaguccagg

SEQ ID NO: 1053 - DNA, 23 bp, Artificial sequence
  Antisense oligomer
cuuacaggcuccaauagugguca

SEQ ID NO: 1054 - DNA, 28 bp, Artificial sequence
  Antisense oligomer
guauacuuacaggcuccaauagugguca

SEQ ID NO: 1055 - DNA, 30 bp, Artificial sequence
  Antisense oligomer
uccaguauacuuacaggcuccaauaguggu

SEQ ID NO: 1056 - DNA, 18 bp, Artificial sequence
  Antisense oligomer
cuuacaggcuccaauagu

SEQ ID NO: 1057 - DNA, 23 bp, Artificial sequence
  Antisense oligomer
guauacuuacaggcuccaauagu

SEQ ID NO: 1058 - DNA, 27 bp, Artificial sequence
  Antisense oligomer
uccaguauacuuacaggcuccaauagu

SEQ ID NO: 1059 - DNA, 22 bp, Artificial sequence
  Antisense oligomer
uccaguauacuuacaggcucca

SEQ ID NO: 1060 - DNA, 25 bp, Artificial sequence
  Antisense oligomer
gggauccaguauacuuacaggcucc

SEQ ID NO: 1061 - DNA, 19 bp, Artificial sequence
  Antisense oligomer
uccaguauacuuacaggcu

SEQ ID NO: 1062 - DNA, 15 bp, Artificial sequence
  Antisense oligomer
uccaguauacuuaca

SEQ ID NO: 1063 - DNA, 28 bp, Artificial sequence
  Antisense oligomer
ctccaacatcaaggaagatggcatttct

SEQ ID NO: 1064 - DNA, 25 bp, Artificial sequence
  Antisense oligomer
catcaaggaagatggcatttctagt

SEQ ID NO: 1065 - DNA, 26 bp, Artificial sequence
  Antisense oligomer
ggagctaaaatattttgggtttttgc

SEQ ID NO: 1066 - DNA, 25 bp, Artificial sequence
  Antisense oligomer
ttttctcataccttctgcttgatga

SEQ ID NO: 1067 - DNA, 27 bp, Artificial sequence
  Antisense oligomer
aggtacctccaacatcaaggaagatgg

SEQ ID NO: 1068 - DNA, 25 bp, Artificial sequence
  Antisense oligomer
ctccaacatcaaggaagatggcatt

SEQ ID NO: 1069 - DNA, 28 bp, Artificial sequence
  Antisense oligomer
ctccaacatcaaggaagatggcatttct

SEQ ID NO: 1070 - DNA, 30 bp, Artificial sequence; identical to SEQ ID NO: 76
  Antisense oligomer

SEQ ID NO: 1071 - DNA, 25 bp, Artificial sequence
  Antisense oligomer
aaggaagatggcatttctagtttgg

SEQ ID NO: 1072 - DNA, 25 bp, Artificial sequence
  Antisense oligomer
cagtctgagtaggagctaaaatatt

SEQ ID NO: 1073 - DNA, 25 bp, Artificial sequence
  Antisense oligomer
gagtaggagctaaaatattttgggt

SEQ ID NO: 1074 - DNA, 25 bp, Artificial sequence
  Antisense oligomer
cugaauucuuucaacuagaauaaaa

SEQ ID NO: 1075 - DNA, 28 bp, Artificial sequence
  Antisense oligomer
gccauuguguugaauccuuuaacauuuc

SEQ ID NO: 1076 - DNA, 25 bp, Artificial sequence
  Antisense oligomer
ccaugacucaagcuuggcucuggcc

SEQ ID NO: 1077 - DNA, 20 bp, Artificial sequence
  Antisense oligomer
cccuauacaguagaugcaau

SEQ ID NO: 1078 - DNA, 24 bp, Artificial sequence
  Antisense oligomer
uugauacuaaccuugguuucugug

SEQ ID NO: 1079 - DNA, 24 bp, Artificial sequence
  Antisense oligomer
caactgttgcctccggttctgaag

SEQ ID NO: 1080 - DNA, 24 bp, Artificial sequence
  Antisense oligomer
ggaccctccttccatgactcaagc

SEQ ID NO: 1081 - DNA, 27 bp, Artificial sequence
  Antisense oligomer
ggtatctttgatactaaccttggtttc

SEQ ID NO: 1082 - DNA, 17 bp, Artificial sequence
  Antisense oligomer
gcccaaugccauccugg

SEQ ID NO: 1083 - DNA, 24 bp, Artificial sequence
  Antisense oligomer
cccauuuugugaauguuuucuuuu

SEQ ID NO: 1084 - DNA, 22 bp, Artificial sequence
  Antisense oligomer
uugugcauuuacccauuuugug

SEQ ID NO: 1085 - DNA, 20 bp, Artificial sequence
  Antisense oligomer
uauccucugaaugucgcauc

SEQ ID NO: 1086 - DNA, 20 bp, Artificial sequence
  Antisense oligomer
gguuauccucugaaugucgc

SEQ ID NO: 1087 - DNA, 19 bp, Artificial sequence
  Antisense oligomer
gagccuuuuuucuucuuug

SEQ ID NO: 1088 - DNA, 19 bp, Artificial sequence
  Antisense oligomer
uccuuucgucucugggcuc

SEQ ID NO: 1089 - DNA, 19 bp, Artificial sequence
  Antisense oligomer
cuccucuuucuucuucugc

SEQ ID NO: 1090 - DNA, 20 bp, Artificial sequence
  Antisense oligomer
cuucgaaacugagcaaauuu

SEQ ID NO: 1091 - DNA, 17 bp, Artificial sequence
  Antisense oligomer
cuugugagacaugagug

SEQ ID NO: 1092 - DNA, 18 bp, Artificial sequence
  Antisense oligomer
cagagacuccucuugcuu

SEQ ID NO: 1093 - DNA, 18 bp, Artificial sequence
  Antisense oligomer
ugcugcugucuucuugcu

SEQ ID NO: 1094 - DNA, 19 bp, Artificial sequence
  Antisense oligomer
uuguuaacuuuuucccauu

SEQ ID NO: 1095 - DNA, 19 bp, Artificial sequence
  Antisense oligomer
cgccgccauuucucaacag

SEQ ID NO: 1096 - DNA, 20 bp, Artificial sequence
  Antisense oligomer
uuuguauuuagcauguuccc

SEQ ID NO: 1097 - DNA, 19 bp, Artificial sequence
  Antisense oligomer
gcugaauuauuucuucccc

SEQ ID NO: 1098 - DNA, 15 bp, Artificial sequence
  Antisense oligomer
cugcuuccuccaacc

SEQ ID NO: 1099 - DNA, 20 bp, Artificial sequence
  Antisense oligomer
gcuuuucuuuuaguugcugc

SEQ ID NO: 1100 - DNA, 18 bp, Artificial sequence
  Antisense oligomer
ucuugcucuucugggcuu

SEQ ID NO: 1101 - DNA, 21 bp, Artificial sequence
  Antisense oligomer
cuugagcuuauuuucaaguuu

SEQ ID NO: 1102 - DNA, 16 bp, Artificial sequence
  Antisense oligomer
uuucuccuuguuucuc

SEQ ID NO: 1103 - DNA, 21 bp, Artificial sequence
  Antisense oligomer
ccauaaauuuccaacugauuc

SEQ ID NO: 1104 - DNA, 19 bp, Artificial sequence
  Antisense oligomer
cuuccacauccgguuguuu

SEQ ID NO: 1105 - DNA, 19 bp, Artificial sequence
  Antisense oligomer
guggcugguuuuuccuugu

SEQ ID NO: 1106 - DNA, 17 bp, Artificial sequence
  Antisense oligomer
cucagagcucagaucuu

SEQ ID NO: 1107 - DNA, 15 bp, Artificial sequence
  Antisense oligomer
ggcugcuuugcccuc

SEQ ID NO: 1108 - DNA, 20 bp, Artificial sequence
  Antisense oligomer
ucaaggaagauggcauuucu

SEQ ID NO: 1109 - DNA, 23 bp, Artificial sequence
  Antisense oligomer
ccucugugauuuuauaacuugau

SEQ ID NO: 1110 - DNA, 18 bp, Artificial sequence
  Antisense oligomer
cuguugccuccgguucug

SEQ ID NO: 1111 - DNA, 18 bp, Artificial sequence
  Antisense oligomer
uuggcucuggccuguccu

SEQ ID NO: 1112 - DNA, 24 bp, Artificial sequence
  Antisense oligomer
gaaaauugugcauuuacccauuuu

SEQ ID NO: 1113 - DNA, 19 bp, Artificial sequence
  Antisense oligomer
cuuccuggauggcuucaau

SEQ ID NO: 1114 - DNA, 19 bp, Artificial sequence
  Antisense oligomer
guacauuaagauggacuuc

SEQ ID NO: 1115 - DNA, 20 bp, Artificial sequence
  Antisense oligomer
ccauuacaguugucuguguu

SEQ ID NO: 1116 - DNA, 20 bp, Artificial sequence
  Antisense oligomer
uaaucugccucuucuuuugg

SEQ ID NO: 1117 - DNA, 16 bp, Artificial sequence
  Antisense oligomer
ucugcuggcaucuugc

SEQ ID NO: 1118 - DNA, 19 bp, Artificial sequence
  Antisense oligomer
ccaucuguuagggucugug

SEQ ID NO: 1119 - DNA, 20 bp, Artificial sequence
  Antisense oligomer
ucugugccaauaugcgaauc

SEQ ID NO: 1120 - DNA, 18 bp, Artificial sequence
  Antisense oligomer
uuaaaugucucaaguucc

SEQ ID NO: 1121 - DNA, 16 bp, Artificial sequence
  Antisense oligomer
guaguucccuccaacg

SEQ ID NO: 1122 - DNA, 15 bp, Artificial sequence
  Antisense oligomer
cauguaguucccucc

SEQ ID NO: 1123 - DNA, 20 bp, Artificial sequence
  Antisense oligomer
uguuaacuuuuucccauugg

SEQ ID NO: 1124 - DNA, 20 bp, Artificial sequence
  Antisense oligomer
cauuuuguuaacuuuuuccc

SEQ ID NO: 1125 - DNA, 18 bp, Artificial sequence
  Antisense oligomer
ucuguuuuugaggauugc

SEQ ID NO: 1126 - DNA, 17 bp, Artificial sequence
  Antisense oligomer
ccaccgcagauucaggc

SEQ ID NO: 1127 - DNA, 17 bp, Artificial sequence
  Antisense oligomer
uuugcagaccuccugcc

SEQ ID NO: 1128 - DNA, 21 bp, Artificial sequence
  Antisense oligomer
gaaauucugacaagauauucu

SEQ ID NO: 1129 - DNA, 15 bp, Artificial sequence
  Antisense oligomer
uaaaacaaauucauu

SEQ ID NO: 1130 - DNA, 20 bp, Artificial sequence
  Antisense oligomer
uccagguucaagugggauac

SEQ ID NO: 1131 - DNA, 15 bp, Artificial sequence
  Antisense oligomer
uuccagguucaagug

SEQ ID NO: 1132 - DNA, 17 bp, Artificial sequence
  Antisense oligomer
ucaagcuuuucuuuuag

SEQ ID NO: 1133 - DNA, 16 bp, Artificial sequence
  Antisense oligomer
cugacaagauauucuu

SEQ ID NO: 1134 - DNA, 19 bp, Artificial sequence
  Antisense oligomer
agguucaagugggauacua

SEQ ID NO: 1135 - DNA, 22 bp, Artificial sequence
  Antisense oligomer
uccaguuucauuuaauuguuug

SEQ ID NO: 1136 - DNA, 23 bp, Artificial sequence
  Antisense oligomer
cugcuugagcuuauuuucaaguu

SEQ ID NO: 1137 - DNA, 19 bp, Artificial sequence
  Antisense oligomer
agcacuuacaagcacgggu

SEQ ID NO: 1138 - DNA, 21 bp, Artificial sequence
  Antisense oligomer
uucaaguuuaucuugcucuuc

SEQ ID NO: 1139 - DNA, 19 bp, Artificial sequence
  Antisense oligomer
ggucuuuuauuugagcuuc

SEQ ID NO: 1140 - DNA, 21 bp, Artificial sequence
  Antisense oligomer
cuucaagcuuuuuuucaagcu

SEQ ID NO: 1141 - DNA, 19 bp, Artificial sequence
  Antisense oligomer
gcuucaauuucuccuuguu

SEQ ID NO: 1142 - DNA, 19 bp, Artificial sequence
  Antisense oligomer
uuuauuugagcuucaauuu

SEQ ID NO: 1143 - DNA, 17 bp, Artificial sequence
  Antisense oligomer
gcugcccaaggucuuuu

SEQ ID NO: 1144 - DNA, 21 bp, Artificial sequence
  Antisense oligomer
cuucaaggucuucaagcuuuu

SEQ ID NO: 1145 - DNA, 21 bp, Artificial sequence
  Antisense oligomer
uaacugcucuucaaggucuuc

SEQ ID NO: 1146 - DNA, 20 bp, Artificial sequence
  Antisense oligomer
gaaagccagucgguaaguuc

SEQ ID NO: 1147 - DNA, 15 bp, Artificial sequence
  Antisense oligomer
cacccaccaucaccc

SEQ ID NO: 1148 - DNA, 20 bp, Artificial sequence
  Antisense oligomer
ugauauccucaaggucaccc

SEQ ID NO: 1149 - DNA, 18 bp, Artificial sequence
  Antisense oligomer
uugcuggucuuguuuuuc

SEQ ID NO: 1150 - DNA, 16 bp, Artificial sequence
  Antisense oligomer
ccguaaugauuguucu

SEQ ID NO: 1151 - DNA, 19 bp, Artificial sequence
  Antisense oligomer
uacauuugucugccacugg

SEQ ID NO: 1152 - DNA, 18 bp, Artificial sequence
  Antisense oligomer
cccggagaaguuucaggg

SEQ ID NO: 1153 - DNA, 20 bp, Artificial sequence
  Antisense oligomer
cuguugcaguaaucuaugag

SEQ ID NO: 1154 - DNA, 23 bp, Artificial sequence
  Antisense oligomer
ugccauuguuucaucagcucuuu

SEQ ID NO: 1155 - DNA, 20 bp, Artificial sequence
  Antisense oligomer
ugcaguaaucuaugaguuuc

SEQ ID NO: 1156 - DNA, 20 bp, Artificial sequence
  Antisense oligomer
uccuguaggacauuggcagu

SEQ ID NO: 1157 - DNA, 18 bp, Artificial sequence
  Antisense oligomer
gagucuucuaggagccuu

SEQ ID NO: 1158 - DNA, 20 bp, Artificial sequence
  Antisense oligomer
uuuuuuggcuguuuucaucc

SEQ ID NO: 1159 - DNA, 20 bp, Artificial sequence
  Antisense oligomer
guucacuccacuugaaguuc

SEQ ID NO: 1160 - DNA, 18 bp, Artificial sequence
  Antisense oligomer
ccuuccagggaucucagg

SEQ ID NO: 1161 - DNA, 17 bp, Artificial sequence
  Antisense oligomer
uaggugccugccggcuu

SEQ ID NO: 1162 - DNA, 21 bp, Artificial sequence
  Antisense oligomer
cugaacugcuggaaagucgcc

SEQ ID NO: 1163 - DNA, 18 bp, Artificial sequence
  Antisense oligomer
uucagcuguagccacacc

SEQ ID NO: 1164 - DNA, 22 bp, Artificial sequence
  Antisense oligomer
uucuuuaguuuucaauucccuc

SEQ ID NO: 1165 - DNA, 19 bp, Artificial sequence
  Antisense oligomer
gaguuucucuaguccuucc

SEQ ID NO: 1166 - DNA, 21 bp, Artificial sequence
  Antisense oligomer
caauuuuucccacucaguauu

SEQ ID NO: 1167 - DNA, 19 bp, Artificial sequence
  Antisense oligomer
uugaaguuccuggagucuu

SEQ ID NO: 1168 - DNA, 18 bp, Artificial sequence
  Antisense oligomer
guucucuuucagaggcgc

SEQ ID NO: 1169 - DNA, 19 bp, Artificial sequence
  Antisense oligomer
gugcugagguuauacggug

SEQ ID NO: 1170 - DNA, 18 bp, Artificial sequence
  Antisense oligomer
gucccugugggcuucaug

SEQ ID NO: 1171 - DNA, 18 bp, Artificial sequence
  Antisense oligomer
gugcugagaugcuggacc

SEQ ID NO: 1172 - DNA, 16 bp, Artificial sequence
  Antisense oligomer
uggcucucucccaggg

SEQ ID NO: 1173 - DNA, 17 bp, Artificial sequence
  Antisense oligomer
gggcacuuuguuuggcg

SEQ ID NO: 1174 - DNA, 19 bp, Artificial sequence
  Antisense oligomer
ggucccagcaaguuguuug

SEQ ID NO: 1175 - DNA, 21 bp, Artificial sequence
  Antisense oligomer
guagagcucugucauuuuggg

SEQ ID NO: 1176 - DNA, 19 bp, Artificial sequence
  Antisense oligomer
gccagaaguugaucagagu

SEQ ID NO: 1177 - DNA, 18 bp, Artificial sequence
  Antisense oligomer
ucuacuggccagaaguug

SEQ ID NO: 1178 - DNA, 20 bp, Artificial sequence
  Antisense oligomer
ugaguaucaucgugugaaag

SEQ ID NO: 1179 - DNA, 19 bp, Artificial sequence
  Antisense oligomer
gcauaauguucaaugcgug

SEQ ID NO: 1180 - DNA, 18 bp, Artificial sequence
  Antisense oligomer
gauccauugcuguuuucc

SEQ ID NO: 1181 - DNA, 21 bp, Artificial sequence
  Antisense oligomer
gagaugcuaucauuuagauaa

SEQ ID NO: 1182 - DNA, 17 bp, Artificial sequence
  Antisense oligomer
cuggcucaggggggagu

SEQ ID NO: 1183 - DNA, 19 bp, Artificial sequence
  Antisense oligomer
uccccucuuuccucacucu

SEQ ID NO: 1184 - DNA, 19 bp, Artificial sequence
  Antisense oligomer
ccuuuauguucgugcugcu

SEQ ID NO: 1185 - DNA, 18 bp, Artificial sequence
  Antisense oligomer
ggcggccuuuguguugac

SEQ ID NO: 1186 - DNA, 19 bp, Artificial sequence
  Antisense oligomer
gagagguagaaggagagga

SEQ ID NO: 1187 - DNA, 19 bp, Artificial sequence
  Antisense oligomer
auaggcugacugcugucgg

SEQ ID NO: 1188 - DNA, 17 bp, Artificial sequence
  Antisense oligomer
uuguguccuggggagga

SEQ ID NO: 1189 - DNA, 18 bp, Artificial sequence
  Antisense oligomer
ugcuccaucaccuccucu

SEQ ID NO: 1190 - DNA, 18 bp, Artificial sequence
  Antisense oligomer
gcuuuccagggguauuuc

SEQ ID NO: 1191 - DNA, 17 bp, Artificial sequence
  Antisense oligomer
cauuggcuuuccagggg

SEQ ID NO: 1192 - DNA, 24 bp, Artificial sequence
  Antisense oligomer
cccauuuugugaauguuuucuuuu

SEQ ID NO: 1193 - DNA, 22 bp, Artificial sequence
  Antisense oligomer
uugugcauuuacccauuuugug

SEQ ID NO: 1194 - DNA, 24 bp, Artificial sequence
  Antisense oligomer
gaaaauugugcauuuacccauuuu

SEQ ID NO: 1195 - DNA, 19 bp, Artificial sequence
  Antisense oligomer
cuuccuggauggcuucaau

SEQ ID NO: 1196 - DNA, 19 bp, Artificial sequence
  Antisense oligomer
guacauuaagauggacuuc

SEQ ID NO: 1197 - DNA, 20 bp, Artificial sequence
  Antisense oligomer
ccauuacaguugucuguguu

SEQ ID NO: 1198 - DNA, 20 bp, Artificial sequence
  Antisense oligomer
uaaucugccucuucuuuugg

SEQ ID NO: 1199 - DNA, 16 bp, Artificial sequence
  Antisense oligomer
ucugcuggcaucuugc

SEQ ID NO: 1200 - DNA, 20 bp, Artificial sequence
  Antisense oligomer
uauccucugaaugucgcauc

SEQ ID NO: 1201 - DNA, 20 bp, Artificial sequence
  Antisense oligomer
gguuauccucugaaugucgc

SEQ ID NO: 1202 - DNA, 19 bp, Artificial sequence
  Antisense oligomer
ccaucuguuagggucugug

SEQ ID NO: 1203 - DNA, 20 bp, Artificial sequence
  Antisense oligomer
ucugugccaauaugcgaauc

SEQ ID NO: 1204 - DNA, 18 bp, Artificial sequence
  Antisense oligomer
uuaaaugucucaaguucc

SEQ ID NO: 1205 - DNA, 16 bp, Artificial sequence
  Antisense oligomer
guaguucccuccaacg

SEQ ID NO: 1206 - DNA, 15 bp, Artificial sequence
  Antisense oligomer
cauguaguucccucc

SEQ ID NO: 1207 - DNA, 19 bp, Artificial sequence
  Antisense oligomer
gagccuuuuuucuucuuug

SEQ ID NO: 1208 - DNA, 19 bp, Artificial sequence
  Antisense oligomer
uccuuucaucucugggcuc

SEQ ID NO: 1209 - DNA, 19 bp, Artificial sequence
  Antisense oligomer
cuccucuuucuucuucugc

SEQ ID NO: 1210 - DNA, 20 bp, Artificial sequence
  Antisense oligomer
cuucgaaacugagcaaauuu

SEQ ID NO: 1211 - DNA, 17 bp, Artificial sequence
  Antisense oligomer
cuugugagacaugagug

SEQ ID NO: 1212 - DNA, 18 bp, Artificial sequence
  Antisense oligomer
cagagacuccucuugcuu

SEQ ID NO: 1213 - DNA, 18 bp, Artificial sequence
  Antisense oligomer
ugcugcugucuucuugcu

SEQ ID NO: 1214 - DNA, 19 bp, Artificial sequence
  Antisense oligomer
uuguuaacuuuuucccauu

SEQ ID NO: 1215 - DNA, 20 bp, Artificial sequence
  Antisense oligomer
uguuaacuuuuucccauugg

SEQ ID NO: 1216 - DNA, 20 bp, Artificial sequence
  Antisense oligomer
cauuuuguuaacuuuuuccc

SEQ ID NO: 1217 - DNA, 19 bp, Artificial sequence
  Antisense oligomer
cuguagcuucacccuuucc

SEQ ID NO: 1218 - DNA, 19 bp, Artificial sequence
  Antisense oligomer
cgccgccauuucucaacag

SEQ ID NO: 1219 - DNA, 20 bp, Artificial sequence
  Antisense oligomer
uuuguauuuagcauguuccc

SEQ ID NO: 1220 - DNA, 19 bp, Artificial sequence
  Antisense oligomer
gcugaauuauuucuucccc

SEQ ID NO: 1221 - DNA, 19 bp, Artificial sequence
  Antisense oligomer
uuuuucugucugacagcug

SEQ ID NO: 1222 - DNA, 18 bp, Artificial sequence
  Antisense oligomer
ucuguuuuugaggauugc

SEQ ID NO: 1223 - DNA, 17 bp, Artificial sequence
  Antisense oligomer
ccaccgcagauucaggc

SEQ ID NO: 1224 - DNA, 17 bp, Artificial sequence
  Antisense oligomer
gcccaaugccauccugg

SEQ ID NO: 1225 - DNA, 17 bp, Artificial sequence
  Antisense oligomer
uuugcagaccuccugcc

SEQ ID NO: 1226 - DNA, 15 bp, Artificial sequence
  Antisense oligomer
cugcuuccuccaacc

SEQ ID NO: 1227 - DNA, 20 bp, Artificial sequence
  Antisense oligomer
guuaucugcuuccuccaacc

SEQ ID NO: 1228 - DNA, 20 bp, Artificial sequence
  Antisense oligomer
gcuuuucuuuuaguugcugc

SEQ ID NO: 1229 - DNA, 15 bp, Artificial sequence
  Antisense oligomer
uuaguugcugcucuu

SEQ ID NO: 1230 - DNA, 21 bp, Artificial sequence
  Antisense oligomer
gaaauucugacaagauauucu

SEQ ID NO: 1231 - DNA, 15 bp, Artificial sequence
  Antisense oligomer
uaaaacaaauucauu

SEQ ID NO: 1232 - DNA, 20 bp, Artificial sequence
  Antisense oligomer
uccagguucaagugggauac

SEQ ID NO: 1233 - DNA, 15 bp, Artificial sequence
  Antisense oligomer
uuccagguucaagug

SEQ ID NO: 1234 - DNA, 17 bp, Artificial sequence
  Antisense oligomer
ucaagcuuuucuuuuag

SEQ ID NO: 1235 - DNA, 16 bp, Artificial sequence
  Antisense oligomer
cugacaagauauucuu

SEQ ID NO: 1236 - DNA, 19 bp, Artificial sequence
  Antisense oligomer
agguucaagugggauacua

SEQ ID NO: 1237 - DNA, 18 bp, Artificial sequence
  Antisense oligomer
ucuugcucuucugggcuu

SEQ ID NO: 1238 - DNA, 21 bp, Artificial sequence
  Antisense oligomer
cuugagcuuauuuucaaguuu

SEQ ID NO: 1239 - DNA, 22 bp, Artificial sequence
  Antisense oligomer
uccaguuucauuuaauuguuug

SEQ ID NO: 1240 - DNA, 23 bp, Artificial sequence
  Antisense oligomer
cugcuugagcuuauuuucaaguu

SEQ ID NO: 1241 - DNA, 19 bp, Artificial sequence
  Antisense oligomer
agcacuuacaagcacgggu

SEQ ID NO: 1242 - DNA, 21 bp, Artificial sequence
  Antisense oligomer
uucaaguuuaucuugcucuuc

SEQ ID NO: 1243 - DNA, 16 bp, Artificial sequence
  Antisense oligomer
uuucuccuuguuucuc

SEQ ID NO: 1244 - DNA, 21 bp, Artificial sequence
  Antisense oligomer
uuauaaauuuccaacugauuc

SEQ ID NO: 1245 - DNA, 19 bp, Artificial sequence
  Antisense oligomer
ggucuuuuauuugagcuuc

SEQ ID NO: 1246 - DNA, 21 bp, Artificial sequence
  Antisense oligomer
cuucaagcuuuuuuucaagcu

SEQ ID NO: 1247 - DNA, 19 bp, Artificial sequence
  Antisense oligomer
gcuucaauuucuccuuguu

SEQ ID NO: 1248 - DNA, 19 bp, Artificial sequence
  Antisense oligomer
uuuauuugagcuucaauuu

SEQ ID NO: 1249 - DNA, 17 bp, Artificial sequence
  Antisense oligomer
gcugcccaaggucuuuu

SEQ ID NO: 1250 - DNA, 21 bp, Artificial sequence
  Antisense oligomer
cuucaaggucuucaagcuuuu

SEQ ID NO: 1251 - DNA, 21 bp, Artificial sequence
  Antisense oligomer
uaacugcucuucaaggucuuc

SEQ ID NO: 1252 - DNA, 19 bp, Artificial sequence
  Antisense oligomer
cuuccacauccgguuguuu

SEQ ID NO: 1253 - DNA, 19 bp, Artificial sequence
  Antisense oligomer
guggcugguuuuuccuugu

SEQ ID NO: 1254 - DNA, 17 bp, Artificial sequence
  Antisense oligomer
cucagagcucagaucuu

SEQ ID NO: 1255 - DNA, 15 bp, Artificial sequence
  Antisense oligomer
ggcugcuuugcccuc

SEQ ID NO: 1256 - DNA, 20 bp, Artificial sequence
  Antisense oligomer
ucaaggaagauggcauuucu

SEQ ID NO: 1257 - DNA, 20 bp, Artificial sequence
  Antisense oligomer
gaaagccagucgguaaguuc

SEQ ID NO: 1258 - DNA, 15 bp, Artificial sequence
  Antisense oligomer
cacccaccaucaccc

SEQ ID NO: 1259 - DNA, 23 bp, Artificial sequence
  Antisense oligomer
ccucugugauuuuauaacuugau

SEQ ID NO: 1260 - DNA, 20 bp, Artificial sequence
  Antisense oligomer
ugauauccucaaggucaccc

SEQ ID NO: 1261 - DNA, 18 bp, Artificial sequence
  Antisense oligomer
uugcuggucuuguuuuuc

SEQ ID NO: 1262 - DNA, 16 bp, Artificial sequence
  Antisense oligomer
ccguaaugauuguucu

SEQ ID NO: 1263 - DNA, 18 bp, Artificial sequence
  Antisense oligomer
cuguugccuccgguucug

SEQ ID NO: 1264 - DNA, 18 bp, Artificial sequence
  Antisense oligomer
uuggcucuggccuguccu

SEQ ID NO: 1265 - DNA, 19 bp, Artificial sequence
  Antisense oligomer
uacauuugucugccacugg

SEQ ID NO: 1266 - DNA, 18 bp, Artificial sequence
  Antisense oligomer
cccggagaaguuucaggg

SEQ ID NO: 1267 - DNA, 20 bp, Artificial sequence
  Antisense oligomer
cuguugcaguaaucuaugag

SEQ ID NO: 1268 - DNA, 23 bp, Artificial sequence
  Antisense oligomer
ugccauuguuucaucagcucuuu

SEQ ID NO: 1269 - DNA, 20 bp, Artificial sequence
  Antisense oligomer
ugcaguaaucuaugaguuuc

SEQ ID NO: 1270 - DNA, 20 bp, Artificial sequence
  Antisense oligomer
uccuguaggacauuggcagu

SEQ ID NO: 1271 - DNA, 18 bp, Artificial sequence
  Antisense oligomer
gagucuucuaggagccuu

SEQ ID NO: 1272 - DNA, 20 bp, Artificial sequence
  Antisense oligomer
uuuuuuggcuguuuucaucc

SEQ ID NO: 1273 - DNA, 20 bp, Artificial sequence
  Antisense oligomer
guucacuccacuugaaguuc

SEQ ID NO: 1274 - DNA, 18 bp, Artificial sequence
  Antisense oligomer
ccuuccagggaucucagg

SEQ ID NO: 1275 - DNA, 17 bp, Artificial sequence
  Antisense oligomer
uaggugccugccggcuu

SEQ ID NO: 1276 - DNA, 21 bp, Artificial sequence
  Antisense oligomer
cugaacugcuggaaagucgcc

SEQ ID NO: 1277 - DNA, 18 bp, Artificial sequence
  Antisense oligomer
uucagcuguagccacacc

SEQ ID NO: 1278 - DNA, 22 bp, Artificial sequence
  Antisense oligomer
uucuuuaguuuucaauucccuc

SEQ ID NO: 1279 - DNA, 19 bp, Artificial sequence
  Antisense oligomer
gaguuucucuaguccuucc

SEQ ID NO: 1280 - DNA, 21 bp, Artificial sequence
  Antisense oligomer
caauuuuucccacucaguauu

SEQ ID NO: 1281 - DNA, 19 bp, Artificial sequence
  Antisense oligomer
uugaaguuccuggagucuu

SEQ ID NO: 1282 - DNA, 18 bp, Artificial sequence
  Antisense oligomer
guucucuuucagaggcgc

SEQ ID NO: 1283 - DNA, 19 bp, Artificial sequence
  Antisense oligomer
gugcugagguuauacggug

SEQ ID NO: 1284 - DNA, 18 bp, Artificial sequence
  Antisense oligomer
gucccugugggcuucaug

SEQ ID NO: 1285 - DNA, 18 bp, Artificial sequence
  Antisense oligomer
gugcugagaugcuggacc

SEQ ID NO: 1286 - DNA, 16 bp, Artificial sequence
  Antisense oligomer
uggcucucucccaggg

SEQ ID NO: 1287 - DNA, 17 bp, Artificial sequence
  Antisense oligomer
gggcacuuuguuuggcg

SEQ ID NO: 1288 - DNA, 19 bp, Artificial sequence
  Antisense oligomer
ggucccagcaaguuguuug

SEQ ID NO: 1289 - DNA, 21 bp, Artificial sequence
  Antisense oligomer
guagagcucugucauuuuggg

SEQ ID NO: 1290 - DNA, 19 bp, Artificial sequence
  Antisense oligomer
gccagaaguugaucagagu

SEQ ID NO: 1291 - DNA, 18 bp, Artificial sequence
  Antisense oligomer
ucuacuggccagaaguug

SEQ ID NO: 1292 - DNA, 20 bp, Artificial sequence
  Antisense oligomer
ugaguaucaucgugugaaag

SEQ ID NO: 1293 - DNA, 19 bp, Artificial sequence
  Antisense oligomer
gcauaauguucaaugcgug

SEQ ID NO: 1294 - DNA, 18 bp, Artificial sequence
  Antisense oligomer
gauccauugcuguuuucc

SEQ ID NO: 1295 - DNA, 21 bp, Artificial sequence
  Antisense oligomer
gagaugcuaucauuuagauaa

SEQ ID NO: 1296 - DNA, 17 bp, Artificial sequence
  Antisense oligomer
cuggcucaggggggagu

SEQ ID NO: 1297 - DNA, 19 bp, Artificial sequence
  Antisense oligomer
uccccucuuuccucacucu

SEQ ID NO: 1298 - DNA, 19 bp, Artificial sequence
  Antisense oligomer
ccuuuauguucgugcugcu

SEQ ID NO: 1299 - DNA, 18 bp, Artificial sequence
  Antisense oligomer
ggcggccuuuguguugac

SEQ ID NO: 1300 - DNA, 19 bp, Artificial sequence
  Antisense oligomer
gagagguagaaggagagga

SEQ ID NO: 1301 - DNA, 19 bp, Artificial sequence
  Antisense oligomer
auaggcugacugcugucgg

SEQ ID NO: 1302 - DNA, 17 bp, Artificial sequence
  Antisense oligomer
uuguguccuggggagga

SEQ ID NO: 1303 - DNA, 18 bp, Artificial sequence
  Antisense oligomer
ugcuccaucaccuccucu

SEQ ID NO: 1304 - DNA, 18 bp, Artificial sequence
  Antisense oligomer
gcuuuccagggguauuuc

SEQ ID NO: 1305 - DNA, 17 bp, Artificial sequence
  Antisense oligomer
cauuggcuuuccagggg

SEQ ID NO: 1306 - DNA, 19 bp, Artificial sequence
  Antisense oligomer
cugacguccagucuuuauc

SEQ ID NO: 1307 - DNA, 18 bp, Artificial sequence
  Antisense oligomer
gggauuuuccgucugcuu

SEQ ID NO: 1308 - DNA, 17 bp, Artificial sequence
  Antisense oligomer
ccgccauuucucaacag

SEQ ID NO: 1309 - DNA, 21 bp, Artificial sequence
  Antisense oligomer
uucucaggaauuugugucuuu

SEQ ID NO: 1310 - DNA, 17 bp, Artificial sequence
  Antisense oligomer
caguuugccgcugccca

SEQ ID NO: 1311 - DNA, 20 bp, Artificial sequence
  Antisense oligomer
guugcauucaauguucugac

SEQ ID NO: 1312 - DNA, 21 bp, Artificial sequence
  Antisense oligomer
auuuuuccuguagaauacugg

SEQ ID NO: 1313 - DNA, 18 bp, Artificial sequence
  Antisense oligomer
gcuggucuuguuuuucaa

SEQ ID NO: 1314 - DNA, 20 bp, Artificial sequence
  Antisense oligomer
uggucuuguuuuucaaauuu

SEQ ID NO: 1315 - DNA, 20 bp, Artificial sequence
  Antisense oligomer
gucuuguuuuucaaauuuug

SEQ ID NO: 1316 - DNA, 20 bp, Artificial sequence
  Antisense oligomer
cuuguuuuucaaauuuuggg

SEQ ID NO: 1317 - DNA, 19 bp, Artificial sequence
  Antisense oligomer
uguuuuucaaauuuugggc

SEQ ID NO: 1318 - DNA, 20 bp, Artificial sequence
  Antisense oligomer
uccuauaagcugagaaucug

SEQ ID NO: 1319 - DNA, 18 bp, Artificial sequence
  Antisense oligomer
gccuucugcagucuucgg

SEQ ID NO: 1320 - DNA, 23 bp, Artificial sequence
  Antisense oligomer
ccggttctgaaggtgttcttgta

SEQ ID NO: 1321 - DNA, 24 bp, Artificial sequence
  Antisense oligomer
tccggttctgaaggtgttcttgta

SEQ ID NO: 1322 - DNA, 25 bp, Artificial sequence
  Antisense oligomer
ctccggttctgaaggtgttcttgta

SEQ ID NO: 1323 - DNA, 26 bp, Artificial sequence
  Antisense oligomer
cctccggttctgaaggtgttcttgta

SEQ ID NO: 1324 - DNA, 27 bp, Artificial sequence
  Antisense oligomer
gcctccggttctgaaggtgttcttgta

SEQ ID NO: 1325 - DNA, 28 bp, Artificial sequence
  Antisense oligomer
tgcctccggttctgaaggtgttcttgta

SEQ ID NO: 1326 - DNA, 22 bp, Artificial sequence
  Antisense oligomer
ccggttctgaaggtgttcttgt

SEQ ID NO: 1327 - DNA, 23 bp, Artificial sequence
  Antisense oligomer
tccggttctgaaggtgttcttgt

SEQ ID NO: 1328 - DNA, 24 bp, Artificial sequence
  Antisense oligomer
ctccggttctgaaggtgttcttgt

SEQ ID NO: 1329 - DNA, 25 bp, Artificial sequence
  Antisense oligomer
cctccggttctgaaggtgttcttgt

SEQ ID NO: 1330 - DNA, 26 bp, Artificial sequence
  Antisense oligomer
gcctccggttctgaaggtgttcttgt

SEQ ID NO: 1331 - DNA, 27 bp, Artificial sequence
  Antisense oligomer
tgcctccggttctgaaggtgttcttgt

SEQ ID NO: 1332 - DNA, 21 bp, Artificial sequence
  Antisense oligomer
ccggttctgaaggtgttcttg

SEQ ID NO: 1333 - DNA, 22 bp, Artificial sequence
  Antisense oligomer
tccggttctgaaggtgttcttg

SEQ ID NO: 1334 - DNA, 23 bp, Artificial sequence
  Antisense oligomer
ctccggttctgaaggtgttcttg

SEQ ID NO: 1335 - DNA, 24 bp, Artificial sequence
  Antisense oligomer
cctccggttctgaaggtgttcttg

SEQ ID NO: 1336 - DNA, 25 bp, Artificial sequence
  Antisense oligomer
gcctccggttctgaaggtgttcttg

SEQ ID NO: 1337 - DNA, 26 bp, Artificial sequence
  Antisense oligomer
tgcctccggttctgaaggtgttcttg

SEQ ID NO: 1338 - DNA, 20 bp, Artificial sequence
  Antisense oligomer
ccggttctgaaggtgttctt

SEQ ID NO: 1339 - DNA, 21 bp, Artificial sequence
  Antisense oligomer
tccggttctgaaggtgttctt

SEQ ID NO: 1340 - DNA, 22 bp, Artificial sequence
  Antisense oligomer
ctccggttctgaaggtgttctt

SEQ ID NO: 1341 - DNA, 23 bp, Artificial sequence
  Antisense oligomer
cctccggttctgaaggtgttctt

SEQ ID NO: 1342 - DNA, 24 bp, Artificial sequence
  Antisense oligomer
gcctccggttctgaaggtgttctt

SEQ ID NO: 1343 - DNA, 25 bp, Artificial sequence
  Antisense oligomer
tgcctccggttctgaaggtgttctt

SEQ ID NO: 1344 - DNA, 19 bp, Artificial sequence
  Antisense oligomer
ccggttctgaaggtgttct

SEQ ID NO: 1345 - DNA, 20 bp, Artificial sequence
  Antisense oligomer
tccggttctgaaggtgttct

SEQ ID NO: 1346 - DNA, 21 bp, Artificial sequence
  Antisense oligomer
ctccggttctgaaggtgttct

SEQ ID NO: 1347 - DNA, 22 bp, Artificial sequence
  Antisense oligomer
cctccggttctgaaggtgttct

SEQ ID NO: 1348 - DNA, 23 bp, Artificial sequence
  Antisense oligomer
gcctccggttctgaaggtgttct

SEQ ID NO: 1349 - DNA, 24 bp, Artificial sequence
  Antisense oligomer
tgcctccggttctgaaggtgttct

SEQ ID NO: 1350 - DNA, 18 bp, Artificial sequence
  Antisense oligomer
ccggttctgaaggtgttc

SEQ ID NO: 1351 - DNA, 19 bp, Artificial sequence
  Antisense oligomer
tccggttctgaaggtgttc

SEQ ID NO: 1352 - DNA, 20 bp, Artificial sequence
  Antisense oligomer
ctccggttctgaaggtgttc

SEQ ID NO: 1353 - DNA, 21 bp, Artificial sequence
  Antisense oligomer
cctccggttctgaaggtgttc

SEQ ID NO: 1354 - DNA, 22 bp, Artificial sequence
  Antisense oligomer
gcctccggttctgaaggtgttc

SEQ ID NO: 1355 - DNA, 23 bp, Artificial sequence
  Antisense oligomer
tgcctccggttctgaaggtgttc

SEQ ID NO: 1356 - DNA, 31 bp, Artificial sequence; identical to SEQ ID NO: 912
  Antisense oligomer

SEQ ID NO: 1357 - DNA, 30 bp, Artificial sequence
  Antisense oligomer
ttgcctccggttctgaaggtgttcttgtac

SEQ ID NO: 1358 - DNA, 21 bp, Artificial sequence
  Antisense oligomer
aggatttggaacagaggcgtc

SEQ ID NO: 1359 - DNA, 20 bp, Artificial sequence
  Antisense oligomer
gtctgccactggcggaggtc

SEQ ID NO: 1360 - DNA, 20 bp, Artificial sequence
  Antisense oligomer
catcaagcagaaggcaacaa

SEQ ID NO: 1361 - DNA, 20 bp, Artificial sequence
  Antisense oligomer
gaagtttcagggccaagtca

SEQ ID NO: 1362 - DNA, 20 bp, Artificial sequence
  Antisense oligomer
cgggcttggacagaacttac

SEQ ID NO: 1363 - DNA, 20 bp, Artificial sequence
  Antisense oligomer
tccttacgggtagcatcctg

SEQ ID NO: 1364 - DNA, 25 bp, Artificial sequence
  Antisense oligomer
ctgaaggtgttcttgtacttcatcc

SEQ ID NO: 1365 - DNA, 19 bp, Artificial sequence
  Antisense oligomer
tgttgagaaatggcggcgt

SEQ ID NO: 1366 - DNA, 31 bp, Artificial sequence; identical to SEQ ID NO: 275
  Antisense oligomer

SEQ ID NO: 1367 - DNA, 25 bp, Artificial sequence
  Antisense oligomer
ucccacugauucugaauucuuucaa

SEQ ID NO: 1368 - DNA, 25 bp, Artificial sequence
  Antisense oligomer
cuucaucccacugauucugaauucu

SEQ ID NO: 1369 - DNA, 25 bp, Artificial sequence
  Antisense oligomer
uuguacuucaucccacugauucuga

SEQ ID NO: 1370 - DNA, 25 bp, Artificial sequence
  Antisense oligomer
uguucuuguacuucaucccacugau

SEQ ID NO: 1371 - DNA, 25 bp, Artificial sequence
  Antisense oligomer
gaagguguucuuguacuucauccca

SEQ ID NO: 1372 - DNA, 25 bp, Artificial sequence
  Antisense oligomer
guucugaagguguucuuguacuuca

SEQ ID NO: 1373 - DNA, 25 bp, Artificial sequence
  Antisense oligomer
cuccgguucugaagguguucuugua

SEQ ID NO: 1374 - DNA, 25 bp, Artificial sequence
  Antisense oligomer
guugccuccgguucugaagguguuc

SEQ ID NO: 1375 - DNA, 25 bp, Artificial sequence
  Antisense oligomer
caacuguugccuccgguucugaagg

SEQ ID NO: 1376 - DNA, 25 bp, Artificial sequence
  Antisense oligomer
ucauucaacuguugccuccgguucu

SEQ ID NO: 1377 - DNA, 25 bp, Artificial sequence
  Antisense oligomer
acauuucauucaacuguugccuccg

SEQ ID NO: 1378 - DNA, 25 bp, Artificial sequence
  Antisense oligomer
cuuuaacauuucauucaacuguugc

SEQ ID NO: 1379 - DNA, 25 bp, Artificial sequence
  Antisense oligomer
gaauccuuuaacauuucauucaacu

SEQ ID NO: 1380 - DNA, 25 bp, Artificial sequence
  Antisense oligomer
guguugaauccuuuaacauuucauu

SEQ ID NO: 1381 - DNA, 25 bp, Artificial sequence
  Antisense oligomer
ccauuguguugaauccuuuaacauu

SEQ ID NO: 1382 - DNA, 25 bp, Artificial sequence
  Antisense oligomer
uccagccauuguguugaauccuuua

SEQ ID NO: 1383 - DNA, 25 bp, Artificial sequence
  Antisense oligomer
uagcuuccagccauuguguugaauc

SEQ ID NO: 1384 - DNA, 25 bp, Artificial sequence
  Antisense oligomer
uuccuuagcuuccagccauuguguu

SEQ ID NO: 1385 - DNA, 25 bp, Artificial sequence
  Antisense oligomer
gcuucuuccuuagcuuccagccauu

SEQ ID NO: 1386 - DNA, 25 bp, Artificial sequence
  Antisense oligomer
gcucagcuucuuccuuagcuuccag

SEQ ID NO: 1387 - DNA, 25 bp, Artificial sequence
  Antisense oligomer
gaccugcucagcuucuuccuuagcu

SEQ ID NO: 1388 - DNA, 25 bp, Artificial sequence
  Antisense oligomer
ccuaagaccugcucagcuucuuccu

SEQ ID NO: 1389 - DNA, 25 bp, Artificial sequence
  Antisense oligomer
ccuguccuaagaccugcucagcuuc

SEQ ID NO: 1390 - DNA, 25 bp, Artificial sequence
  Antisense oligomer
ucuggccuguccuaagaccugcuca

SEQ ID NO: 1391 - DNA, 25 bp, Artificial sequence
  Antisense oligomer
uuggcucuggccuguccuaagaccu

SEQ ID NO: 1392 - DNA, 25 bp, Artificial sequence
  Antisense oligomer
caagcuuggcucuggccuguccuaa

SEQ ID NO: 1393 - DNA, 25 bp, Artificial sequence
  Antisense oligomer
ugacucaagcuuggcucuggccugu

SEQ ID NO: 1394 - DNA, 25 bp, Artificial sequence
  Antisense oligomer
uuccaugacucaagcuuggcucugg

SEQ ID NO: 1395 - DNA, 25 bp, Artificial sequence
  Antisense oligomer
ccuccuuccaugacucaagcuuggc

SEQ ID NO: 1396 - DNA, 25 bp, Artificial sequence
  Antisense oligomer
gggacccuccuuccaugacucaagc

SEQ ID NO: 1397 - DNA, 25 bp, Artificial sequence
  Antisense oligomer
guauagggacccuccuuccaugacu

SEQ ID NO: 1398 - DNA, 25 bp, Artificial sequence
  Antisense oligomer
cuacuguauagggacccuccuucca

SEQ ID NO: 1399 - DNA, 25 bp, Artificial sequence
  Antisense oligomer
ugcaucuacuguauagggacccucc

SEQ ID NO: 1400 - DNA, 25 bp, Artificial sequence
  Antisense oligomer
uggauugcaucuacuguauagggac

SEQ ID NO: 1401 - DNA, 25 bp, Artificial sequence
  Antisense oligomer
ucuuuuggauugcaucuacuguaua

SEQ ID NO: 1402 - DNA, 25 bp, Artificial sequence
  Antisense oligomer
gauuuucuuuuggauugcaucuacu

SEQ ID NO: 1403 - DNA, 25 bp, Artificial sequence
  Antisense oligomer
ucugugauuuucuuuuggauugcau

SEQ ID NO: 1404 - DNA, 25 bp, Artificial sequence
  Antisense oligomer
ugguuucugugauuuucuuuuggau

SEQ ID NO: 1405 - DNA, 25 bp, Artificial sequence
  Antisense oligomer
ccuuagcuuccagccauuguguuga

SEQ ID NO: 1406 - DNA, 25 bp, Artificial sequence
  Antisense oligomer
ucuuccuuagcuuccagccauugug

SEQ ID NO: 1407 - DNA, 25 bp, Artificial sequence
  Antisense oligomer
ggcucuggccuguccuaagaccugc

SEQ ID NO: 1408 - DNA, 25 bp, Artificial sequence
  Antisense oligomer
agcuuggcucuggccuguccuaaga

SEQ ID NO: 1409 - DNA, 25 bp, Artificial sequence
  Antisense oligomer
cucaagcuuggcucuggccuguccu

SEQ ID NO: 1410 - DNA, 25 bp, Artificial sequence
  Antisense oligomer
gacccuccuuccaugacucaagcuu

SEQ ID NO: 1411 - DNA, 25 bp, Artificial sequence
  Antisense oligomer
auagggacccuccuuccaugacuca

SEQ ID NO: 1412 - DNA, 25 bp, Artificial sequence
  Antisense oligomer
cuguauagggacccuccuuccauga

SEQ ID NO: 1413 - DNA, 25 bp, Artificial sequence
  Antisense oligomer
ugugauuuucuuuuggauugcaucu

SEQ ID NO: 1414 - DNA, 25 bp, Artificial sequence
  Antisense oligomer
guuucugugauuuucuuuuggauug

SEQ ID NO: 1415 - DNA, 25 bp, Artificial sequence
  Antisense oligomer
cuugguuucugugauuuucuuuugg

SEQ ID NO: 1416 - DNA, 25 bp, Artificial sequence
  Antisense oligomer
ccgguucugaagguguucuuguacu

SEQ ID NO: 1417 - DNA, 25 bp, Artificial sequence
  Antisense oligomer
uccgguucugaagguguucuuguac

SEQ ID NO: 1418 - DNA, 25 bp, Artificial sequence
  Antisense oligomer
ccuccgguucugaagguguucuugu

SEQ ID NO: 1419 - DNA, 25 bp, Artificial sequence
  Antisense oligomer
gccuccgguucugaagguguucuug

SEQ ID NO: 1420 - DNA, 25 bp, Artificial sequence
  Antisense oligomer
ugccuccgguucugaagguguucuu

SEQ ID NO: 1421 - DNA, 25 bp, Artificial sequence
  Antisense oligomer
uugccuccgguucugaagguguucu

SEQ ID NO: 1422 - DNA, 25 bp, Artificial sequence
  Antisense oligomer
uguugccuccgguucugaagguguu

SEQ ID NO: 1423 - DNA, 25 bp, Artificial sequence
  Antisense oligomer
cuguugccuccgguucugaaggugu

SEQ ID NO: 1424 - DNA, 25 bp, Artificial sequence
  Antisense oligomer
acuguugccuccgguucugaaggug

SEQ ID NO: 1425 - DNA, 25 bp, Artificial sequence
  Antisense oligomer
aacuguugccuccgguucugaaggu

SEQ ID NO: 1426 - DNA, 30 bp, Artificial sequence
  Antisense oligomer
uguugccuccgguucugaagguguucuugu

SEQ ID NO: 1427 - DNA, 20 bp, Artificial sequence
  Antisense oligomer
gguucugaagguguucuugu

SEQ ID NO: 1428 - DNA, 20 bp, Artificial sequence
  Antisense oligomer
uccgguucugaagguguucu

SEQ ID NO: 1429 - DNA, 20 bp, Artificial sequence
  Antisense oligomer
ccuccgguucugaagguguu

SEQ ID NO: 1430 - DNA, 20 bp, Artificial sequence
  Antisense oligomer
uugccuccgguucugaaggu

SEQ ID NO: 1431 - DNA, 20 bp, Artificial sequence
  Antisense oligomer
uguugccuccgguucugaag

SEQ ID NO: 1432 - DNA, 18 bp, Artificial sequence
  Antisense oligomer
uucugaagguguucuugu

SEQ ID NO: 1433 - DNA, 18 bp, Artificial sequence
  Antisense oligomer
cgguucugaagguguucu

SEQ ID NO: 1434 - DNA, 18 bp, Artificial sequence
  Antisense oligomer
cuccgguucugaaggugu

SEQ ID NO: 1435 - DNA, 18 bp, Artificial sequence
  Antisense oligomer
ugccuccgguucugaagg

SEQ ID NO: 1436 - DNA, 18 bp, Artificial sequence
  Antisense oligomer
uguugccuccgguucuga

SEQ ID NO: 1437 - DNA, 15 bp, Artificial sequence
  Antisense oligomer
uucugaagguguucu

SEQ ID NO: 1438 - DNA, 15 bp, Artificial sequence
  Antisense oligomer
uccgguucugaaggu

SEQ ID NO: 1439 - DNA, 15 bp, Artificial sequence
  Antisense oligomer
uugccuccgguucug

SEQ ID NO: 1440 - DNA, 18 bp, Artificial sequence
  Antisense oligomer
cuguugccuccgguucug

SEQ ID NO: 1441 - DNA, 21 bp, Artificial sequence
  Antisense oligomer
caatgccatcctggagttcct

SEQ ID NO: 1442 - DNA, 21 bp, Artificial sequence
  Antisense oligomer
ccaatgccatcctggagttcc

SEQ ID NO: 1443 - DNA, 21 bp, Artificial sequence
  Antisense oligomer
cccaatgccatcctggagttc

SEQ ID NO: 1444 - DNA, 21 bp, Artificial sequence
  Antisense oligomer
gcccaatgccatcctggagtt

SEQ ID NO: 1445 - DNA, 21 bp, Artificial sequence
  Antisense oligomer
tgcccaatgccatcctggagt

SEQ ID NO: 1446 - DNA, 25 bp, Artificial sequence
  Antisense oligomer
cccaatgccatcctggagttcctgt

SEQ ID NO: 1447 - DNA, 30 bp, Artificial sequence
  Antisense oligomer
cagtttgccgctgcccaatgccatcctgga

SEQ ID NO: 1448 - DNA, 20 bp, Artificial sequence
  Antisense oligomer
ccaatgccatcctggagttc

SEQ ID NO: 1449 - DNA, 20 bp, Artificial sequence
  Antisense oligomer
cccaatgccatcctggagtt

SEQ ID NO: 1450 - DNA, 21 bp, Artificial sequence
  Antisense oligomer
cccaatgccatcctggagttc

SEQ ID NO: 1451 - DNA, 25 bp, Artificial sequence
  Antisense oligomer
gcugcccaaugccauccuggaguuc

SEQ ID NO: 1452 - DNA, 25 bp, Artificial sequence
  Antisense oligomer
uugccgcugcccaaugccauccugg

SEQ ID NO: 1453 - DNA, 25 bp, Artificial sequence
  Antisense oligomer
acaguuugccgcugcccaaugccau

SEQ ID NO: 1454 - DNA, 25 bp, Artificial sequence
  Antisense oligomer
ugacaacaguuugccgcugcccaau

SEQ ID NO: 1455 - DNA, 25 bp, Artificial sequence
  Antisense oligomer
uguucugacaacaguuugccgcugc

SEQ ID NO: 1456 - DNA, 25 bp, Artificial sequence
  Antisense oligomer
uucaauguucugacaacaguuugcc

SEQ ID NO: 1457 - DNA, 25 bp, Artificial sequence
  Antisense oligomer
uugcauucaauguucugacaacagu

SEQ ID NO: 1458 - DNA, 25 bp, Artificial sequence
  Antisense oligomer
cccaguugcauucaauguucugaca

SEQ ID NO: 1459 - DNA, 25 bp, Artificial sequence
  Antisense oligomer
ucuuccccaguugcauucaauguuc

SEQ ID NO: 1460 - DNA, 25 bp, Artificial sequence
  Antisense oligomer
uuauuucuuccccaguugcauucaa

SEQ ID NO: 1461 - DNA, 25 bp, Artificial sequence
  Antisense oligomer
cugaauuauuucuuccccaguugca

SEQ ID NO: 1462 - DNA, 25 bp, Artificial sequence
  Antisense oligomer
gauugcugaauuauuucuuccccag

SEQ ID NO: 1463 - DNA, 25 bp, Artificial sequence
  Antisense oligomer
uugaggauugcugaauuauuucuuc

SEQ ID NO: 1464 - DNA, 25 bp, Artificial sequence
  Antisense oligomer
uguuuuugaggauugcugaauuauu

SEQ ID NO: 1465 - DNA, 25 bp, Artificial sequence
  Antisense oligomer
gcaucuguuuuugaggauugcugaa

SEQ ID NO: 1466 - DNA, 25 bp, Artificial sequence
  Antisense oligomer
uacuggcaucuguuuuugaggauug

SEQ ID NO: 1467 - DNA, 25 bp, Artificial sequence
  Antisense oligomer
uuugccgcugcccaaugccauccug

SEQ ID NO: 1468 - DNA, 20 bp, Artificial sequence
  Antisense oligomer
gctcaggtcggattgacatt

SEQ ID NO: 1469 - DNA, 20 bp, Artificial sequence
  Antisense oligomer
gggcaactcttccaccagta

SEQ ID NO: 1470 - DNA, 20 bp, Artificial sequence
  Antisense oligomer
cctgagaattgggaacatgc

SEQ ID NO: 1471 - DNA, 20 bp, Artificial sequence
  Antisense oligomer
ttgctgctcttttccaggtt

SEQ ID NO: 1472 - DNA, 21 bp, Artificial sequence
  Antisense oligomer
agcagcctctcgctcactcac

SEQ ID NO: 1473 - DNA, 21 bp, Artificial sequence
  Antisense oligomer
ttccaaagcagcctctcgctc

SEQ ID NO: 1474 - DNA, 21 bp, Artificial sequence
  Antisense oligomer
ttcttccaaagcagcctctcg

SEQ ID NO: 1475 - DNA, 21 bp, Artificial sequence
  Antisense oligomer
agtttcttccaaagcagcctc

SEQ ID NO: 1476 - DNA, 21 bp, Artificial sequence
  Antisense oligomer
tttcttccaaagcagcctctc

SEQ ID NO: 1477 - DNA, 21 bp, Artificial sequence
  Antisense oligomer
gtttcttccaaagcagcctct

SEQ ID NO: 1478 - DNA, 21 bp, Artificial sequence
  Antisense oligomer
gagtttcttccaaagcagcct

SEQ ID NO: 1479 - DNA, 21 bp, Artificial sequence
  Antisense oligomer
tgagtttcttccaaagcagcc

SEQ ID NO: 1480 - DNA, 21 bp, Artificial sequence
  Antisense oligomer
gcagccucucgcucacucacc

SEQ ID NO: 1481 - DNA, 21 bp, Artificial sequence
  Antisense oligomer
ccaaagcagccucucgcucac

SEQ ID NO: 1482 - DNA, 21 bp, Artificial sequence
  Antisense oligomer
uucuuccaaagcagccucucg

SEQ ID NO: 1483 - DNA, 21 bp, Artificial sequence
  Antisense oligomer
aucuaugaguuucuuccaaag

SEQ ID NO: 1484 - DNA, 21 bp, Artificial sequence
  Antisense oligomer
uguugcaguaaucuaugaguu

SEQ ID NO: 1485 - DNA, 21 bp, Artificial sequence
  Antisense oligomer
cagggggaacuguugcaguaa

SEQ ID NO: 1486 - DNA, 21 bp, Artificial sequence
  Antisense oligomer
uuuccagguccagggggaacu

SEQ ID NO: 1487 - DNA, 21 bp, Artificial sequence
  Antisense oligomer
gcaagaaacuuuuccaggucc

SEQ ID NO: 1488 - DNA, 21 bp, Artificial sequence
  Antisense oligomer
uguaagccaggcaagaaacuu

SEQ ID NO: 1489 - DNA, 21 bp, Artificial sequence
  Antisense oligomer
uuucagcuucuguaagccagg

SEQ ID NO: 1490 - DNA, 21 bp, Artificial sequence
  Antisense oligomer
uuggcaguuguuucagcuucu

SEQ ID NO: 1491 - DNA, 21 bp, Artificial sequence
  Antisense oligomer
cuguaggacauuggcaguugu

SEQ ID NO: 1492 - DNA, 21 bp, Artificial sequence
  Antisense oligomer
ggguagcauccuguaggacau

SEQ ID NO: 1493 - DNA, 21 bp, Artificial sequence
  Antisense oligomer
cuuuccuuacggguagcaucc

SEQ ID NO: 1494 - DNA, 21 bp, Artificial sequence
  Antisense oligomer
uucuaggagccuuuccuuacg

SEQ ID NO: 1495 - DNA, 21 bp, Artificial sequence
  Antisense oligomer
ccuuggagucuucuaggagcc

SEQ ID NO: 1496 - DNA, 21 bp, Artificial sequence
  Antisense oligomer
ucuuuuacucccuuggagucu

SEQ ID NO: 1497 - DNA, 21 bp, Artificial sequence
  Antisense oligomer
uuucaucagcucuuuuacucc

SEQ ID NO: 1498 - DNA, 20 bp, Artificial sequence
  Antisense oligomer
uugccauuguuucaucagcu

SEQ ID NO: 1499 - DNA, 20 bp, Artificial sequence
  Antisense oligomer
uccuguaggacauuggcagu

SEQ ID NO: 1500 - DNA, 20 bp, Artificial sequence
  Antisense oligomer
catggaaggagggtccctat

SEQ ID NO: 1501 - DNA, 20 bp, Artificial sequence
  Antisense oligomer
ctgccggcttaattcatcat

SEQ ID NO: 1502 - DNA, 21 bp, Artificial sequence
  Antisense oligomer
ataatgaaaacgccgccattt

SEQ ID NO: 1503 - DNA, 21 bp, Artificial sequence
  Antisense oligomer
tcataatgaaaacgccgccat

SEQ ID NO: 1504 - DNA, 21 bp, Artificial sequence
  Antisense oligomer
atcataatgaaaacgccgcca

SEQ ID NO: 1505 - DNA, 21 bp, Artificial sequence
  Antisense oligomer
tatcataatgaaaacgccgcc

SEQ ID NO: 1506 - DNA, 21 bp, Artificial sequence
  Antisense oligomer
atatcataatgaaaacgccgc

SEQ ID NO: 1507 - DNA, 21 bp, Artificial sequence
  Antisense oligomer
tatatcataatgaaaacgccg

SEQ ID NO: 1508 - DNA, 21 bp, Artificial sequence
  Antisense oligomer
ttatatcataatgaaaacgcc

SEQ ID NO: 1509 - DNA, 30 bp, Artificial sequence
  Antisense oligomer
tgaaaacgccgccatttctcaacagatctg

SEQ ID NO: 1510 - DNA, 20 bp, Artificial sequence
  Antisense oligomer
atcataatgaaaacgccgcc

SEQ ID NO: 1511 - DNA, 20 bp, Artificial sequence
  Antisense oligomer
tatcataatgaaaacgccgc

SEQ ID NO: 1512 - DNA, 21 bp, Artificial sequence
  Antisense oligomer
tatcataatgaaaacgccgcc

SEQ ID NO: 1513 - DNA, 22 bp, Artificial sequence
  Antisense oligomer
cucaacagaucugucaaaucgc

SEQ ID NO: 1514 - DNA, 22 bp, Artificial sequence
  Antisense oligomer
gccgccauuucucaacagaucu

SEQ ID NO: 1515 - DNA, 22 bp, Artificial sequence
  Antisense oligomer
uaaugaaaacgccgccauuucu

SEQ ID NO: 1516 - DNA, 22 bp, Artificial sequence
  Antisense oligomer
uaucauaaugaaaacgccgcca

SEQ ID NO: 1517 - DNA, 22 bp, Artificial sequence
  Antisense oligomer
cuuuauaucauaaugaaaacgc

SEQ ID NO: 1518 - DNA, 22 bp, Artificial sequence
  Antisense oligomer
gauuaaauaucuuuauaucaua

SEQ ID NO: 1519 - DNA, 22 bp, Artificial sequence
  Antisense oligomer
guuagccacugauuaaauaucu

SEQ ID NO: 1520 - DNA, 22 bp, Artificial sequence
  Antisense oligomer
uucagcuucuguuagccacuga

SEQ ID NO: 1521 - DNA, 22 bp, Artificial sequence
  Antisense oligomer
ugagaaacuguucagcuucugu

SEQ ID NO: 1522 - DNA, 22 bp, Artificial sequence
  Antisense oligomer
ugugucuuucugagaaacuguu

SEQ ID NO: 1523 - DNA, 22 bp, Artificial sequence
  Antisense oligomer
guucccaauucucaggaauuug

SEQ ID NO: 1524 - DNA, 22 bp, Artificial sequence
  Antisense oligomer
uauuuagcauguucccaauucu

SEQ ID NO: 1525 - DNA, 22 bp, Artificial sequence
  Antisense oligomer
auaccauuuguauuuagcaugu

SEQ ID NO: 1526 - DNA, 20 bp, Artificial sequence
  Antisense oligomer
ucagcuucuguuagccacug

SEQ ID NO: 1527 - DNA, 21 bp, Artificial sequence
  Antisense oligomer
tccagtatacttacaggctcc

SEQ ID NO: 1528 - DNA, 21 bp, Artificial sequence
  Antisense oligomer
atccagtatacttacaggctc

SEQ ID NO: 1529 - DNA, 21 bp, Artificial sequence
  Antisense oligomer
gatccagtatacttacaggct

SEQ ID NO: 1530 - DNA, 21 bp, Artificial sequence
  Antisense oligomer
ggatccagtatacttacaggc

SEQ ID NO: 1531 - DNA, 21 bp, Artificial sequence
  Antisense oligomer
gggatccagtatacttacagg

SEQ ID NO: 1532 - DNA, 25 bp, Artificial sequence
  Antisense oligomer
cttacaggctccaatagtggtcagt

SEQ ID NO: 1533 - DNA, 25 bp, Artificial sequence
  Antisense oligomer
gggatccagtatacttacaggctcc

SEQ ID NO: 1534 - DNA, 20 bp, Artificial sequence
  Antisense oligomer
aacaaccggatgtggaagag

SEQ ID NO: 1535 - DNA, 20 bp, Artificial sequence
  Antisense oligomer
ttggagatggcagtttcctt

SEQ ID NO: 1536 - DNA, 22 bp, Artificial sequence
  Antisense oligomer
cauuucucaacagaucugucaa

SEQ ID NO: 1537 - DNA, 22 bp, Artificial sequence
  Antisense oligomer
aaaacgccgccauuucucaaca

SEQ ID NO: 1538 - DNA, 22 bp, Artificial sequence
  Antisense oligomer
aauaucuuuauaucauaaugaa

SEQ ID NO: 1539 - DNA, 22 bp, Artificial sequence
  Antisense oligomer
cuucuguuagccacugauuaaa

SEQ ID NO: 1540 - DNA, 22 bp, Artificial sequence
  Antisense oligomer
aacuguucagcuucuguuagcc

SEQ ID NO: 1541 - DNA, 22 bp, Artificial sequence
  Antisense oligomer
cuuucugagaaacuguucagcu

SEQ ID NO: 1542 - DNA, 22 bp, Artificial sequence
  Antisense oligomer
gaauuugugucuuucugagaaa

SEQ ID NO: 1543 - DNA, 22 bp, Artificial sequence
  Antisense oligomer
cucaggaauuugugucuuucug

SEQ ID NO: 1544 - DNA, 22 bp, Artificial sequence
  Antisense oligomer
caauucucaggaauuugugucu

SEQ ID NO: 1545 - DNA, 22 bp, Artificial sequence
  Antisense oligomer
agcauguucccaauucucagga

SEQ ID NO: 1546 - DNA, 18 bp, Artificial sequence
  Antisense oligomer
gagtcttctaggagcctt

SEQ ID NO: 1547 - DNA, 20 bp, Artificial sequence
  Antisense oligomer
gtttcttccaaagcagcctc

SEQ ID NO: 1548 - DNA, 20 bp, Artificial sequence
  Antisense oligomer
agtttcttccaaagcagcct

SEQ ID NO: 1549 - DNA, 21 bp, Artificial sequence
  Antisense oligomer
agtttcttccaaagcagcctc

SEQ ID NO: 1550 - DNA, 20 bp, Artificial sequence
  Antisense oligomer
ggatccagtatacttacagg

SEQ ID NO: 1551 - DNA, 20 bp, Artificial sequence
  Antisense oligomer
gggatccagtatacttacag

SEQ ID NO: 1552 - DNA, 21 bp, Artificial sequence
  Antisense oligomer
tgggatccagtatacttacag

SEQ ID NO: 1553 - DNA, 21 bp, Artificial sequence
  Antisense oligomer
atgggatccagtatacttaca

SEQ ID NO: 1554 - DNA, 16 bp, Artificial sequence
  Antisense oligomer
guggcuaacagaagcu

SEQ ID NO: 1555 - DNA, 17 bp, Artificial sequence
  Antisense oligomer
gggaacaugcuaaauac

SEQ ID NO: 1556 - DNA, 18 bp, Artificial sequence
  Antisense oligomer
agacacaaauuccugaga

SEQ ID NO: 1557 - DNA, 11 bp, Artificial sequence
  Antisense oligomer
cuguugagaaa

SEQ ID NO: 1558 - DNA, 20 bp, Artificial sequence
  Antisense oligomer
ucagcuucuguuagccacug

SEQ ID NO: 1559 - DNA, 20 bp, Artificial sequence
  Antisense oligomer
uucagcuucuguuagccacu

SEQ ID NO: 1560 - DNA, 21 bp, Artificial sequence
  Antisense oligomer
uucagcuucuguuagccacug

SEQ ID NO: 1561 - DNA, 21 bp, Artificial sequence
  Antisense oligomer
ucagcuucuguuagccacuga

SEQ ID NO: 1562 - DNA, 22 bp, Artificial sequence
  Antisense oligomer
uucagcuucuguuagccacuga

SEQ ID NO: 1563 - DNA, 21 bp, Artificial sequence
  Antisense oligomer
ucagcuucuguuagccacuga

SEQ ID NO: 1564 - DNA, 22 bp, Artificial sequence
  Antisense oligomer
uucagcuucuguuagccacuga

SEQ ID NO: 1565 - DNA, 22 bp, Artificial sequence
  Antisense oligomer
ucagcuucuguuagccacugau

SEQ ID NO: 1566 - DNA, 23 bp, Artificial sequence
  Antisense oligomer
uucagcuucuguuagccacugau

SEQ ID NO: 1567 - DNA, 23 bp, Artificial sequence
  Antisense oligomer
ucagcuucuguuagccacugauu

SEQ ID NO: 1568 - DNA, 24 bp, Artificial sequence
  Antisense oligomer
uucagcuucuguuagccacugauu

SEQ ID NO: 1569 - DNA, 24 bp, Artificial sequence
  Antisense oligomer
ucagcuucuguuagccacugauua

SEQ ID NO: 1570 - DNA, 24 bp, Artificial sequence
  Antisense oligomer
uucagcuucuguuagccacugaua

SEQ ID NO: 1571 - DNA, 25 bp, Artificial sequence
  Antisense oligomer
ucagcuucuguuagccacugauuaa

SEQ ID NO: 1572 - DNA, 26 bp, Artificial sequence
  Antisense oligomer
uucagcuucuguuagccacugauuaa

SEQ ID NO: 1573 - DNA, 26 bp, Artificial sequence
  Antisense oligomer
ucagcuucuguuagccacugauuaaa

SEQ ID NO: 1574 - DNA, 27 bp, Artificial sequence
  Antisense oligomer
uucagcuucuguuagccacugauuaaa

SEQ ID NO: 1575 - DNA, 19 bp, Artificial sequence
  Antisense oligomer
cagcuucuguuagccacug

SEQ ID NO: 1576 - DNA, 21 bp, Artificial sequence
  Antisense oligomer
cagcuucuguuagccacugau

SEQ ID NO: 1577 - DNA, 21 bp, Artificial sequence
  Antisense oligomer
agcuucuguuagccacugauu

SEQ ID NO: 1578 - DNA, 22 bp, Artificial sequence
  Antisense oligomer
cagcuucuguuagccacugauu

SEQ ID NO: 1579 - DNA, 22 bp, Artificial sequence
  Antisense oligomer
agcuucuguuagccacugauua

SEQ ID NO: 1580 - DNA, 23 bp, Artificial sequence
  Antisense oligomer
cagcuucuguuagccacugauua

SEQ ID NO: 1581 - DNA, 23 bp, Artificial sequence
  Antisense oligomer
agcuucuguuagccacugauuaa

SEQ ID NO: 1582 - DNA, 24 bp, Artificial sequence
  Antisense oligomer
cagcuucuguuagccacugauuaa

SEQ ID NO: 1583 - DNA, 24 bp, Artificial sequence
  Antisense oligomer
agcuucuguuagccacugauuaaa

SEQ ID NO: 1584 - DNA, 25 bp, Artificial sequence
  Antisense oligomer
cagcuucuguuagccacugauuaaa

SEQ ID NO: 1585 - DNA, 24 bp, Artificial sequence
  Antisense oligomer
agcuucuguuagccacugauuaaa

SEQ ID NO: 1586 - DNA, 20 bp, Artificial sequence
  Antisense oligomer
agcuucuguuagccacugau

SEQ ID NO: 1587 - DNA, 20 bp, Artificial sequence
  Antisense oligomer
gcuucuguuagccacugauu

SEQ ID NO: 1588 - DNA, 21 bp, Artificial sequence
  Antisense oligomer
agcuucuguuagccacugauu

SEQ ID NO: 1589 - DNA, 21 bp, Artificial sequence
  Antisense oligomer
gcuucuguuagccacugauua

SEQ ID NO: 1590 - DNA, 22 bp, Artificial sequence
  Antisense oligomer
agcuucuguuagccacugauua

SEQ ID NO: 1591 - DNA, 22 bp, Artificial sequence
  Antisense oligomer
gcuucuguuagccacugauuaa

SEQ ID NO: 1592 - DNA, 23 bp, Artificial sequence
  Antisense oligomer
agcuucuguuagccacugauuaa

SEQ ID NO: 1593 - DNA, 23 bp, Artificial sequence
  Antisense oligomer
gcuucuguuagccacugauuaaa

SEQ ID NO: 1594 - DNA, 24 bp, Artificial sequence
  Antisense oligomer
agcuucuguuagccacugauuaaa

SEQ ID NO: 1595 - DNA, 23 bp, Artificial sequence
  Antisense oligomer
gcuucuguuagccacugauuaaa

SEQ ID NO: 1596 - DNA, 23 bp, Artificial sequence
  Antisense oligomer
ccauuuguauuuagcauguuccc

SEQ ID NO: 1597 - DNA, 20 bp, Artificial sequence
  Antisense oligomer
agauaccauuuguauuuagc

SEQ ID NO: 1598 - DNA, 19 bp, Artificial sequence
  Antisense oligomer
gccauuucucaacagaucu

SEQ ID NO: 1599 - DNA, 23 bp, Artificial sequence
  Antisense oligomer
gccauuucucaacagaucuguca

SEQ ID NO: 1600 - DNA, 23 bp, Artificial sequence
  Antisense oligomer
auucucaggaauuugugucuuuc

SEQ ID NO: 1601 - DNA, 21 bp, Artificial sequence
  Antisense oligomer
ucucaggaauuugugucuuuc

SEQ ID NO: 1602 - DNA, 18 bp, Artificial sequence
  Antisense oligomer
guucagcuucuguuagcc

SEQ ID NO: 1603 - DNA, 21 bp, Artificial sequence
  Antisense oligomer
cugauuaaauaucuuuauauc

SEQ ID NO: 1604 - DNA, 18 bp, Artificial sequence
  Antisense oligomer
gccgccauuucucaacag

SEQ ID NO: 1605 - DNA, 18 bp, Artificial sequence
  Antisense oligomer
guauuuagcauguuccca

SEQ ID NO: 1606 - DNA, 18 bp, Artificial sequence
  Antisense oligomer
caggaauuugugucuuuc

SEQ ID NO: 1607 - DNA, 21 bp, Artificial sequence
  Antisense oligomer
ucuguuagccacugauuaaau

SEQ ID NO: 1608 - DNA, 20 bp, Artificial sequence
  Antisense oligomer
cgaccugagcuuuguuguag

SEQ ID NO: 1609 - DNA, 25 bp, Artificial sequence
  Antisense oligomer
cgaccugagcuuuguuguagacuau

SEQ ID NO: 1610 - DNA, 23 bp, Artificial sequence
  Antisense oligomer
ccugagcuuuguuguagacuauc

SEQ ID NO: 1611 - DNA, 23 bp, Artificial sequence
  Antisense oligomer
cguugcacuuugcaaugcugcug

SEQ ID NO: 1612 - DNA, 19 bp, Artificial sequence
  Antisense oligomer
cuguagcuucacccuuucc

SEQ ID NO: 1613 - DNA, 24 bp, Artificial sequence
  Antisense oligomer
gagagagcuuccuguagcuucacc

SEQ ID NO: 1614 - DNA, 27 bp, Artificial sequence
  Antisense oligomer
guccuuguacauuuuguuaacuuuuuc

SEQ ID NO: 1615 - DNA, 20 bp, Artificial sequence
  Antisense oligomer
ucagcuucuguuagccacug

SEQ ID NO: 1616 - DNA, 20 bp, Artificial sequence
  Antisense oligomer
uucagcuucuguuagccacu

SEQ ID NO: 1617 - DNA, 21 bp, Artificial sequence
  Antisense oligomer
uucagcuucuguuagccacug

SEQ ID NO: 1618 - DNA, 21 bp, Artificial sequence
  Antisense oligomer
ucagcuucuguuagccacuga

SEQ ID NO: 1619 - DNA, 22 bp, Artificial sequence
  Antisense oligomer
uucagcuucuguuagccacuga

SEQ ID NO: 1620 - DNA, 21 bp, Artificial sequence
  Antisense oligomer
ucagcuucuguuagccacuga

SEQ ID NO: 1621 - DNA, 22 bp, Artificial sequence
  Antisense oligomer
uucagcuucuguuagccacuga

SEQ ID NO: 1622 - DNA, 22 bp, Artificial sequence
  Antisense oligomer
ucagcuucuguuagccacugau

SEQ ID NO: 1623 - DNA, 23 bp, Artificial sequence
  Antisense oligomer
uucagcuucuguuagccacugau

SEQ ID NO: 1624 - DNA, 23 bp, Artificial sequence
  Antisense oligomer
ucagcuucuguuagccacugauu

SEQ ID NO: 1625 - DNA, 24 bp, Artificial sequence
  Antisense oligomer
uucagcuucuguuagccacugauu

SEQ ID NO: 1626 - DNA, 24 bp, Artificial sequence
  Antisense oligomer
ucagcuucuguuagccacugauua

SEQ ID NO: 1627 - DNA, 24 bp, Artificial sequence
  Antisense oligomer
uucagcuucuguuagccacugaua

SEQ ID NO: 1628 - DNA, 25 bp, Artificial sequence
  Antisense oligomer
ucagcuucuguuagccacugauuaa

SEQ ID NO: 1629 - DNA, 26 bp, Artificial sequence
  Antisense oligomer
uucagcuucuguuagccacugauuaa

SEQ ID NO: 1630 - DNA, 26 bp, Artificial sequence
  Antisense oligomer
ucagcuucuguuagccacugauuaaa

SEQ ID NO: 1631 - DNA, 27 bp, Artificial sequence
  Antisense oligomer
uucagcuucuguuagccacugauuaaa

SEQ ID NO: 1632 - DNA, 19 bp, Artificial sequence
  Antisense oligomer
cagcuucuguuagccacug

SEQ ID NO: 1633 - DNA, 21 bp, Artificial sequence
  Antisense oligomer
cagcuucuguuagccacugau

SEQ ID NO: 1634 - DNA, 21 bp, Artificial sequence
  Antisense oligomer
agcuucuguuagccacugauu

SEQ ID NO: 1635 - DNA, 22 bp, Artificial sequence
  Antisense oligomer
cagcuucuguuagccacugauu

SEQ ID NO: 1636 - DNA, 22 bp, Artificial sequence
  Antisense oligomer
agcuucuguuagccacugauua

SEQ ID NO: 1637 - DNA, 23 bp, Artificial sequence
  Antisense oligomer
cagcuucuguuagccacugauua

SEQ ID NO: 1638 - DNA, 23 bp, Artificial sequence
  Antisense oligomer
agcuucuguuagccacugauuaa

SEQ ID NO: 1639 - DNA, 24 bp, Artificial sequence
  Antisense oligomer
cagcuucuguuagccacugauuaa

SEQ ID NO: 1640 - DNA, 24 bp, Artificial sequence
  Antisense oligomer
agcuucuguuagccacugauuaaa

SEQ ID NO: 1641 - DNA, 25 bp, Artificial sequence
  Antisense oligomer
cagcuucuguuagccacugauuaaa

SEQ ID NO: 1642 - DNA, 24 bp, Artificial sequence
  Antisense oligomer
agcuucuguuagccacugauuaaa

SEQ ID NO: 1643 - DNA, 20 bp, Artificial sequence
  Antisense oligomer
agcuucuguuagccacugau

SEQ ID NO: 1644 - DNA, 20 bp, Artificial sequence
  Antisense oligomer
gcuucuguuagccacugauu

SEQ ID NO: 1645 - DNA, 21 bp, Artificial sequence
  Antisense oligomer
agcuucuguuagccacugauu

SEQ ID NO: 1646 - DNA, 21 bp, Artificial sequence
  Antisense oligomer
gcuucuguuagccacugauua

SEQ ID NO: 1647 - DNA, 22 bp, Artificial sequence
  Antisense oligomer
agcuucuguuagccacugauua

SEQ ID NO: 1648 - DNA, 22 bp, Artificial sequence
  Antisense oligomer
gcuucuguuagccacugauuaa

SEQ ID NO: 1649 - DNA, 23 bp, Artificial sequence
  Antisense oligomer
agcuucuguuagccacugauuaa

SEQ ID NO: 1650 - DNA, 23 bp, Artificial sequence
  Antisense oligomer
gcuucuguuagccacugauuaaa

SEQ ID NO: 1651 - DNA, 24 bp, Artificial sequence
  Antisense oligomer
agcuucuguuagccacugauuaaa

SEQ ID NO: 1652 - DNA, 23 bp, Artificial sequence
  Antisense oligomer
gcuucuguuagccacugauuaaa

SEQ ID NO: 1653 - DNA, 23 bp, Artificial sequence
  Antisense oligomer
ccauuuguauuuagcauguuccc

SEQ ID NO: 1654 - DNA, 20 bp, Artificial sequence
  Antisense oligomer
agauaccauuuguauuuagc

SEQ ID NO: 1655 - DNA, 19 bp, Artificial sequence
  Antisense oligomer
gccauuucucaacagaucu

SEQ ID NO: 1656 - DNA, 23 bp, Artificial sequence
  Antisense oligomer
gccauuucucaacagaucuguca

SEQ ID NO: 1657 - DNA, 23 bp, Artificial sequence
  Antisense oligomer
auucucaggaauuugugucuuuc

SEQ ID NO: 1658 - DNA, 21 bp, Artificial sequence
  Antisense oligomer
ucucaggaauuugugucuuuc

SEQ ID NO: 1659 - DNA, 18 bp, Artificial sequence
  Antisense oligomer
guucagcuucuguuagcc

SEQ ID NO: 1660 - DNA, 21 bp, Artificial sequence
  Antisense oligomer
cugauuaaauaucuuuauauc

SEQ ID NO: 1661 - DNA, 18 bp, Artificial sequence
  Antisense oligomer
gccgccauuucucaacag

SEQ ID NO: 1662 - DNA, 18 bp, Artificial sequence
  Antisense oligomer
guauuuagcauguuccca

SEQ ID NO: 1663 - DNA, 18 bp, Artificial sequence
  Antisense oligomer
caggaauuugugucuuuc

SEQ ID NO: 1664 - DNA, 25 bp, Artificial sequence
  Antisense oligomer
uuugccgcugcccaaugccauccug

SEQ ID NO: 1665 - DNA, 25 bp, Artificial sequence
  Antisense oligomer
auucaauguucugacaacaguuugc

SEQ ID NO: 1666 - DNA, 25 bp, Artificial sequence
  Antisense oligomer
ccaguugcauucaauguucugacaa

SEQ ID NO: 1667 - DNA, 22 bp, Artificial sequence
  Antisense oligomer
caguugcauucaauguucugac

SEQ ID NO: 1668 - DNA, 20 bp, Artificial sequence
  Antisense oligomer
aguugcauucaauguucuga

SEQ ID NO: 1669 - DNA, 21 bp, Artificial sequence
  Antisense oligomer
gauugcugaauuauuucuucc

SEQ ID NO: 1670 - DNA, 25 bp, Artificial sequence
  Antisense oligomer
gauugcugaauuauuucuuccccag

SEQ ID NO: 1671 - DNA, 25 bp, Artificial sequence
  Antisense oligomer
auugcugaauuauuucuuccccagu

SEQ ID NO: 1672 - DNA, 25 bp, Artificial sequence
  Antisense oligomer
uugcugaauuauuucuuccccaguu

SEQ ID NO: 1673 - DNA, 25 bp, Artificial sequence
  Antisense oligomer
ugcugaauuauuucuuccccaguug

SEQ ID NO: 1674 - DNA, 25 bp, Artificial sequence
  Antisense oligomer
gcugaauuauuucuuccccaguugc

SEQ ID NO: 1675 - DNA, 25 bp, Artificial sequence
  Antisense oligomer
cugaauuauuucuuccccaguugca

SEQ ID NO: 1676 - DNA, 25 bp, Artificial sequence
  Antisense oligomer
ugaauuauuucuuccccaguugcau

SEQ ID NO: 1677 - DNA, 25 bp, Artificial sequence
  Antisense oligomer
gaauuauuucuuccccaguugcauu

SEQ ID NO: 1678 - DNA, 25 bp, Artificial sequence
  Antisense oligomer
aauuauuucuuccccaguugcauuc

SEQ ID NO: 1679 - DNA, 25 bp, Artificial sequence
  Antisense oligomer
auuauuucuuccccaguugcauuca

SEQ ID NO: 1680 - DNA, 25 bp, Artificial sequence
  Antisense oligomer
uuauuucuuccccaguugcauucaa

SEQ ID NO: 1681 - DNA, 25 bp, Artificial sequence
  Antisense oligomer
uauuucuuccccaguugcauucaau

SEQ ID NO: 1682 - DNA, 25 bp, Artificial sequence
  Antisense oligomer
auuucuuccccaguugcauucaaug

SEQ ID NO: 1683 - DNA, 25 bp, Artificial sequence
  Antisense oligomer
uuucuuccccaguugcauucaaugu

SEQ ID NO: 1684 - DNA, 25 bp, Artificial sequence
  Antisense oligomer
uucuuccccaguugcauucaauguu

SEQ ID NO: 1685 - DNA, 25 bp, Artificial sequence
  Antisense oligomer
ucuuccccaguugcauucaauguuc

SEQ ID NO: 1686 - DNA, 25 bp, Artificial sequence
  Antisense oligomer
cuuccccaguugcauucaauguucu

SEQ ID NO: 1687 - DNA, 25 bp, Artificial sequence
  Antisense oligomer
uuccccaguugcauucaauguucug

SEQ ID NO: 1688 - DNA, 25 bp, Artificial sequence
  Antisense oligomer
uccccaguugcauucaauguucuga

SEQ ID NO: 1689 - DNA, 25 bp, Artificial sequence
  Antisense oligomer
ccccaguugcauucaauguucugac

SEQ ID NO: 1690 - DNA, 25 bp, Artificial sequence
  Antisense oligomer
cccaguugcauucaauguucugaca

SEQ ID NO: 1691 - DNA, 25 bp, Artificial sequence
  Antisense oligomer
ccaguugcauucaauguucugacaa

SEQ ID NO: 1692 - DNA, 25 bp, Artificial sequence
  Antisense oligomer
caguugcauucaauguucugacaac

SEQ ID NO: 1693 - DNA, 25 bp, Artificial sequence
  Antisense oligomer
aguugcauucaauguucugacaaca

SEQ ID NO: 1694 - DNA, 25 bp, Artificial sequence
  Antisense oligomer
guugcauucaauguucugacaacag

SEQ ID NO: 1695 - DNA, 25 bp, Artificial sequence
  Antisense oligomer
uugcauucaauguucugacaacagu

SEQ ID NO: 1696 - DNA, 25 bp, Artificial sequence
  Antisense oligomer
ugcauucaauguucugacaacaguu

SEQ ID NO: 1697 - DNA, 25 bp, Artificial sequence
  Antisense oligomer
gcauucaauguucugacaacaguuu

SEQ ID NO: 1698 - DNA, 25 bp, Artificial sequence
  Antisense oligomer
cauucaauguucugacaacaguuug

SEQ ID NO: 1699 - DNA, 25 bp, Artificial sequence
  Antisense oligomer
auucaauguucugacaacaguuugc

SEQ ID NO: 1700 - DNA, 25 bp, Artificial sequence
  Antisense oligomer
ucaauguucugacaacaguuugccg

SEQ ID NO: 1701 - DNA, 25 bp, Artificial sequence
  Antisense oligomer
caauguucugacaacaguuugccgc

SEQ ID NO: 1702 - DNA, 25 bp, Artificial sequence
  Antisense oligomer
aauguucugacaacaguuugccgcu

SEQ ID NO: 1703 - DNA, 25 bp, Artificial sequence
  Antisense oligomer
auguucugacaacaguuugccgcug

SEQ ID NO: 1704 - DNA, 25 bp, Artificial sequence
  Antisense oligomer
uguucugacaacaguuugccgcugc

SEQ ID NO: 1705 - DNA, 25 bp, Artificial sequence
  Antisense oligomer
guucugacaacaguuugccgcugcc

SEQ ID NO: 1706 - DNA, 25 bp, Artificial sequence
  Antisense oligomer
uucugacaacaguuugccgcugccc

SEQ ID NO: 1707 - DNA, 25 bp, Artificial sequence
  Antisense oligomer
ucugacaacaguuugccgcugccca

SEQ ID NO: 1708 - DNA, 25 bp, Artificial sequence
  Antisense oligomer
cugacaacaguuugccgcugcccaa

SEQ ID NO: 1709 - DNA, 25 bp, Artificial sequence
  Antisense oligomer
ugacaacaguuugccgcugcccaau

SEQ ID NO: 1710 - DNA, 25 bp, Artificial sequence
  Antisense oligomer
gacaacaguuugccgcugcccaaug

SEQ ID NO: 1711 - DNA, 25 bp, Artificial sequence
  Antisense oligomer
acaacaguuugccgcugcccaaugc

SEQ ID NO: 1712 - DNA, 25 bp, Artificial sequence
  Antisense oligomer
caacaguuugccgcugcccaaugcc

SEQ ID NO: 1713 - DNA, 25 bp, Artificial sequence
  Antisense oligomer
aacaguuugccgcugcccaaugcca

SEQ ID NO: 1714 - DNA, 25 bp, Artificial sequence
  Antisense oligomer
acaguuugccgcugcccaaugccau

SEQ ID NO: 1715 - DNA, 25 bp, Artificial sequence
  Antisense oligomer
caguuugccgcugcccaaugccauc

SEQ ID NO: 1716 - DNA, 25 bp, Artificial sequence
  Antisense oligomer
aguuugccgcugcccaaugccaucc

SEQ ID NO: 1717 - DNA, 25 bp, Artificial sequence
  Antisense oligomer
guuugccgcugcccaaugccauccu

SEQ ID NO: 1718 - DNA, 25 bp, Artificial sequence
  Antisense oligomer
uuugccgcugcccaaugccauccug

SEQ ID NO: 1719 - DNA, 25 bp, Artificial sequence
  Antisense oligomer
uugccgcugcccaaugccauccugg

SEQ ID NO: 1720 - DNA, 25 bp, Artificial sequence
  Antisense oligomer
ugccgcugcccaaugccauccugga

SEQ ID NO: 1721 - DNA, 25 bp, Artificial sequence
  Antisense oligomer
gccgcugcccaaugccauccuggag

SEQ ID NO: 1722 - DNA, 25 bp, Artificial sequence
  Antisense oligomer
ccgcugcccaaugccauccuggagu

SEQ ID NO: 1723 - DNA, 25 bp, Artificial sequence
  Antisense oligomer
cgcugcccaaugccauccuggaguu

SEQ ID NO: 1724 - DNA, 25 bp, Artificial sequence
  Antisense oligomer
gcuuuucuuuuaguugcugcucuuu

SEQ ID NO: 1725 - DNA, 25 bp, Artificial sequence
  Antisense oligomer
cuuuucuuuuaguugcugcucuuuu

SEQ ID NO: 1726 - DNA, 25 bp, Artificial sequence
  Antisense oligomer
uuuucuuuuaguugcugcucuuuuc

SEQ ID NO: 1727 - DNA, 25 bp, Artificial sequence
  Antisense oligomer
uuucuuuuaguugcugcucuuuucc

SEQ ID NO: 1728 - DNA, 25 bp, Artificial sequence
  Antisense oligomer
uucuuuuaguugcugcucuuuucca

SEQ ID NO: 1729 - DNA, 25 bp, Artificial sequence
  Antisense oligomer
ucuuuuaguugcugcucuuuuccag

SEQ ID NO: 1730 - DNA, 25 bp, Artificial sequence
  Antisense oligomer
cuuuuaguugcugcucuuuuccagg

SEQ ID NO: 1731 - DNA, 25 bp, Artificial sequence
  Antisense oligomer
uuuuaguugcugcucuuuuccaggu

SEQ ID NO: 1732 - DNA, 25 bp, Artificial sequence
  Antisense oligomer
uuuaguugcugcucuuuuccagguu

SEQ ID NO: 1733 - DNA, 25 bp, Artificial sequence
  Antisense oligomer
uuaguugcugcucuuuuccagguuc

SEQ ID NO: 1734 - DNA, 25 bp, Artificial sequence
  Antisense oligomer
uaguugcugcucuuuuccagguuca

SEQ ID NO: 1735 - DNA, 25 bp, Artificial sequence
  Antisense oligomer
aguugcugcucuuuuccagguucaa

SEQ ID NO: 1736 - DNA, 25 bp, Artificial sequence
  Antisense oligomer
guugcugcucuuuuccagguucaag

SEQ ID NO: 1737 - DNA, 25 bp, Artificial sequence
  Antisense oligomer
uugcugcucuuuuccagguucaagu

SEQ ID NO: 1738 - DNA, 25 bp, Artificial sequence
  Antisense oligomer
ugcugcucuuuuccagguucaagug

SEQ ID NO: 1739 - DNA, 25 bp, Artificial sequence
  Antisense oligomer
gcugcucuuuuccagguucaagugg

SEQ ID NO: 1740 - DNA, 25 bp, Artificial sequence
  Antisense oligomer
cugcucuuuuccagguucaaguggg

SEQ ID NO: 1741 - DNA, 25 bp, Artificial sequence
  Antisense oligomer
ugcucuuuuccagguucaaguggga

SEQ ID NO: 1742 - DNA, 25 bp, Artificial sequence
  Antisense oligomer
gcucuuuuccagguucaagugggac

SEQ ID NO: 1743 - DNA, 25 bp, Artificial sequence
  Antisense oligomer
cucuuuuccagguucaagugggaua

SEQ ID NO: 1744 - DNA, 25 bp, Artificial sequence
  Antisense oligomer
ucuuuuccagguucaagugggauac

SEQ ID NO: 1745 - DNA, 25 bp, Artificial sequence
  Antisense oligomer
cuuuuccagguucaagugggauacu

SEQ ID NO: 1746 - DNA, 25 bp, Artificial sequence
  Antisense oligomer
uuuuccagguucaagugggauacua

SEQ ID NO: 1747 - DNA, 25 bp, Artificial sequence
  Antisense oligomer
uuuccagguucaagugggauacuag

SEQ ID NO: 1748 - DNA, 25 bp, Artificial sequence
  Antisense oligomer
uuccagguucaagugggauacuagc

SEQ ID NO: 1749 - DNA, 25 bp, Artificial sequence
  Antisense oligomer
uccagguucaagugggauacuagca

SEQ ID NO: 1750 - DNA, 25 bp, Artificial sequence
  Antisense oligomer
ccagguucaagugggauacuagcaa

SEQ ID NO: 1751 - DNA, 25 bp, Artificial sequence
  Antisense oligomer
cagguucaagugggauacuagcaau

SEQ ID NO: 1752 - DNA, 25 bp, Artificial sequence
  Antisense oligomer
agguucaagugggauacuagcaaug

SEQ ID NO: 1753 - DNA, 25 bp, Artificial sequence
  Antisense oligomer
gguucaagugggauacuagcaaugu

SEQ ID NO: 1754 - DNA, 25 bp, Artificial sequence
  Antisense oligomer
guucaagugggauacuagcaauguu

SEQ ID NO: 1755 - DNA, 25 bp, Artificial sequence
  Antisense oligomer
uucaagugggauacuagcaauguua

SEQ ID NO: 1756 - DNA, 25 bp, Artificial sequence
  Antisense oligomer
ucaagugggauacuagcaauguuau

SEQ ID NO: 1757 - DNA, 25 bp, Artificial sequence
  Antisense oligomer
caagugggauacuagcaauguuauc

SEQ ID NO: 1758 - DNA, 25 bp, Artificial sequence
  Antisense oligomer
aagugggauacuagcaauguuaucu

SEQ ID NO: 1759 - DNA, 25 bp, Artificial sequence
  Antisense oligomer
agugggauacuagcaauguuaucug

SEQ ID NO: 1760 - DNA, 25 bp, Artificial sequence
  Antisense oligomer
gugggauacuagcaauguuaucugc

SEQ ID NO: 1761 - DNA, 25 bp, Artificial sequence
  Antisense oligomer
ugggauacuagcaauguuaucugcu

SEQ ID NO: 1762 - DNA, 25 bp, Artificial sequence
  Antisense oligomer
gggauacuagcaauguuaucugcuu

SEQ ID NO: 1763 - DNA, 25 bp, Artificial sequence
  Antisense oligomer
ggauacuagcaauguuaucugcuuc

SEQ ID NO: 1764 - DNA, 25 bp, Artificial sequence
  Antisense oligomer
gauacuagcaauguuaucugcuucc

SEQ ID NO: 1765 - DNA, 25 bp, Artificial sequence
  Antisense oligomer
auacuagcaauguuaucugcuuccu

SEQ ID NO: 1766 - DNA, 25 bp, Artificial sequence
  Antisense oligomer
uacuagcaauguuaucugcuuccuc

SEQ ID NO: 1767 - DNA, 25 bp, Artificial sequence
  Antisense oligomer
acuagcaauguuaucugcuuccucc

SEQ ID NO: 1768 - DNA, 25 bp, Artificial sequence
  Antisense oligomer
cuagcaauguuaucugcuuccucca

SEQ ID NO: 1769 - DNA, 25 bp, Artificial sequence
  Antisense oligomer
uagcaauguuaucugcuuccuccaa

SEQ ID NO: 1770 - DNA, 25 bp, Artificial sequence
  Antisense oligomer
agcaauguuaucugcuuccuccaac

SEQ ID NO: 1771 - DNA, 25 bp, Artificial sequence
  Antisense oligomer
gcaauguuaucugcuuccuccaacc

SEQ ID NO: 1772 - DNA, 25 bp, Artificial sequence
  Antisense oligomer
caauguuaucugcuuccuccaacca

SEQ ID NO: 1773 - DNA, 25 bp, Artificial sequence
  Antisense oligomer
aauguuaucugcuuccuccaaccau

SEQ ID NO: 1774 - DNA, 25 bp, Artificial sequence
  Antisense oligomer
auguuaucugcuuccuccaaccaua

SEQ ID NO: 1775 - DNA, 25 bp, Artificial sequence
  Antisense oligomer
uguuaucugcuuccuccaaccauaa

SEQ ID NO: 1776 - DNA, 25 bp, Artificial sequence
  Antisense oligomer
guuaucugcuuccuccaaccauaaa

SEQ ID NO: 1777 - DNA, 19 bp, Artificial sequence
  Antisense oligomer
gcugcucuuuuccagguuc

SEQ ID NO: 1778 - DNA, 20 bp, Artificial sequence
  Antisense oligomer
ucuuuuccagguucaagugg

SEQ ID NO: 1779 - DNA, 19 bp, Artificial sequence
  Antisense oligomer
agguucaagugggauacua

SEQ ID NO: 1780 - DNA, 20 bp, Artificial sequence
  Antisense oligomer
cucagcucuugaaguaaacg

SEQ ID NO: 1781 - DNA, 20 bp, Artificial sequence
  Antisense oligomer
ccucagcucuugaaguaaac

SEQ ID NO: 1782 - DNA, 21 bp, Artificial sequence
  Antisense oligomer
ccucagcucuugaaguaaacg

SEQ ID NO: 1783 - DNA, 21 bp, Artificial sequence
  Antisense oligomer
auaguggucaguccaggagcu

SEQ ID NO: 1784 - DNA, 21 bp, Artificial sequence
  Antisense oligomer
caguccaggagcuaggucagg

SEQ ID NO: 1785 - DNA, 25 bp, Artificial sequence
  Antisense oligomer
uaguggucaguccaggagcuagguc

SEQ ID NO: 1786 - DNA, 25 bp, Artificial sequence
  Antisense oligomer
agagcagguaccuccaacaucaagg

SEQ ID NO: 1787 - DNA, 25 bp, Artificial sequence
  Antisense oligomer
gagcagguaccuccaacaucaagga

SEQ ID NO: 1788 - DNA, 25 bp, Artificial sequence
  Antisense oligomer
agcagguaccuccaacaucaaggaa

SEQ ID NO: 1789 - DNA, 25 bp, Artificial sequence
  Antisense oligomer
gcagguaccuccaacaucaaggaag

SEQ ID NO: 1790 - DNA, 25 bp, Artificial sequence
  Antisense oligomer
cagguaccuccaacaucaaggaaga

SEQ ID NO: 1791 - DNA, 25 bp, Artificial sequence
  Antisense oligomer
agguaccuccaacaucaaggaagau

SEQ ID NO: 1792 - DNA, 25 bp, Artificial sequence
  Antisense oligomer
gguaccuccaacaucaaggaagaug

SEQ ID NO: 1793 - DNA, 25 bp, Artificial sequence
  Antisense oligomer
guaccuccaacaucaaggaagaugg

SEQ ID NO: 1794 - DNA, 25 bp, Artificial sequence
  Antisense oligomer
uaccuccaacaucaaggaagauggc

SEQ ID NO: 1795 - DNA, 25 bp, Artificial sequence
  Antisense oligomer
accuccaacaucaaggaagauggca

SEQ ID NO: 1796 - DNA, 25 bp, Artificial sequence
  Antisense oligomer
ccuccaacaucaaggaagauggcau

SEQ ID NO: 1797 - DNA, 25 bp, Artificial sequence
  Antisense oligomer
cuccaacaucaaggaagauggcauu

SEQ ID NO: 1798 - DNA, 30 bp, Artificial sequence; identical to SEQ ID NO: 263
  Antisense oligomer

SEQ ID NO: 1799 - DNA, 25 bp, Artificial sequence
  Antisense oligomer
uccaacaucaaggaagauggcauuu

SEQ ID NO: 1800 - DNA, 25 bp, Artificial sequence
  Antisense oligomer
ccaacaucaaggaagauggcauuuc

SEQ ID NO: 1801 - DNA, 25 bp, Artificial sequence
  Antisense oligomer
caacaucaaggaagauggcauuucu

SEQ ID NO: 1802 - DNA, 25 bp, Artificial sequence
  Antisense oligomer
aacaucaaggaagauggcauuucua

SEQ ID NO: 1803 - DNA, 25 bp, Artificial sequence
  Antisense oligomer
acaucaaggaagauggcauuucuag

SEQ ID NO: 1804 - DNA, 30 bp, Artificial sequence; identical to SEQ ID NO: 79
  Antisense oligomer

SEQ ID NO: 1805 - DNA, 25 bp, Artificial sequence
  Antisense oligomer
acaucaaggaagauggcauuucuag

SEQ ID NO: 1806 - DNA, 25 bp, Artificial sequence
  Antisense oligomer
caucaaggaagauggcauuucuagu

SEQ ID NO: 1807 - DNA, 25 bp, Artificial sequence
  Antisense oligomer
aucaaggaagauggcauuucuaguu

SEQ ID NO: 1808 - DNA, 25 bp, Artificial sequence
  Antisense oligomer
ucaaggaagauggcauuucuaguuu

SEQ ID NO: 1809 - DNA, 20 bp, Artificial sequence
  Antisense oligomer
ucaaggaagauggcauuucu

SEQ ID NO: 1810 - DNA, 25 bp, Artificial sequence
  Antisense oligomer
caaggaagauggcauuucuaguuug

SEQ ID NO: 1811 - DNA, 25 bp, Artificial sequence
  Antisense oligomer
aaggaagauggcauuucuaguuugg

SEQ ID NO: 1812 - DNA, 25 bp, Artificial sequence
  Antisense oligomer
aggaagauggcauuucuaguuugga

SEQ ID NO: 1813 - DNA, 25 bp, Artificial sequence
  Antisense oligomer
ggaagauggcauuucuaguuuggag

SEQ ID NO: 1814 - DNA, 25 bp, Artificial sequence
  Antisense oligomer
gaagauggcauuucuaguuuggaga

SEQ ID NO: 1815 - DNA, 25 bp, Artificial sequence
  Antisense oligomer
aagauggcauuucuaguuuggagau

SEQ ID NO: 1816 - DNA, 25 bp, Artificial sequence
  Antisense oligomer
agauggcauuucuaguuuggagaug

SEQ ID NO: 1817 - DNA, 25 bp, Artificial sequence
  Antisense oligomer
gauggcauuucuaguuuggagaugg

SEQ ID NO: 1818 - DNA, 25 bp, Artificial sequence
  Antisense oligomer
auggcauuucuaguuuggagauggc

SEQ ID NO: 1819 - DNA, 25 bp, Artificial sequence
  Antisense oligomer
uggcauuucuaguuuggagauggca

SEQ ID NO: 1820 - DNA, 25 bp, Artificial sequence
  Antisense oligomer
ggcauuucuaguuuggagauggcag

SEQ ID NO: 1821 - DNA, 25 bp, Artificial sequence
  Antisense oligomer
gcauuucuaguuuggagauggcagu

SEQ ID NO: 1822 - DNA, 25 bp, Artificial sequence
  Antisense oligomer
cauuucuaguuuggagauggcaguu

SEQ ID NO: 1823 - DNA, 25 bp, Artificial sequence
  Antisense oligomer
auuucuaguuuggagauggcaguuu

SEQ ID NO: 1824 - DNA, 25 bp, Artificial sequence
  Antisense oligomer
uuucuaguuuggagauggcaguuuc

SEQ ID NO: 1825 - DNA, 25 bp, Artificial sequence
  Antisense oligomer
uucuaguuuggagauggcaguuucc

SEQ ID NO: 1826 - DNA, 25 bp, Artificial sequence
  Antisense oligomer
ccucuugauugcuggucuuguuuuu

SEQ ID NO: 1827 - DNA, 25 bp, Artificial sequence
  Antisense oligomer
cucuugauugcuggucuuguuuuuc

SEQ ID NO: 1828 - DNA, 25 bp, Artificial sequence
  Antisense oligomer
ucuugauugcuggucuuguuuuuca

SEQ ID NO: 1829 - DNA, 25 bp, Artificial sequence
  Antisense oligomer
cuugauugcuggucuuguuuuucaa

SEQ ID NO: 1830 - DNA, 25 bp, Artificial sequence
  Antisense oligomer
uugauugcuggucuuguuuuucaaa

SEQ ID NO: 1831 - DNA, 25 bp, Artificial sequence
  Antisense oligomer
ugauugcuggucuuguuuuucaaau

SEQ ID NO: 1832 - DNA, 25 bp, Artificial sequence
  Antisense oligomer
gauugcuggucuuguuuuucaaauu

SEQ ID NO: 1833 - DNA, 25 bp, Artificial sequence
  Antisense oligomer
auugcuggucuuguuuuucaaauuu

SEQ ID NO: 1834 - DNA, 25 bp, Artificial sequence
  Antisense oligomer
uugcuggucuuguuuuucaaauuuu

SEQ ID NO: 1835 - DNA, 25 bp, Artificial sequence
  Antisense oligomer
ugcuggucuuguuuuucaaauuuug

SEQ ID NO: 1836 - DNA, 25 bp, Artificial sequence
  Antisense oligomer
gcuggucuuguuuuucaaauuuugg

SEQ ID NO: 1837 - DNA, 25 bp, Artificial sequence
  Antisense oligomer
cuggucuuguuuuucaaauuuuggg

SEQ ID NO: 1838 - DNA, 25 bp, Artificial sequence
  Antisense oligomer
uggucuuguuuuucaaauuuugggc

SEQ ID NO: 1839 - DNA, 25 bp, Artificial sequence
  Antisense oligomer
ggucuuguuuuucaaauuuugggca

SEQ ID NO: 1840 - DNA, 25 bp, Artificial sequence
  Antisense oligomer
gucuuguuuuucaaauuuugggcag

SEQ ID NO: 1841 - DNA, 25 bp, Artificial sequence
  Antisense oligomer
ucuuguuuuucaaauuuugggcagc

SEQ ID NO: 1842 - DNA, 25 bp, Artificial sequence
  Antisense oligomer
cuuguuuuucaaauuuugggcagcg

SEQ ID NO: 1843 - DNA, 25 bp, Artificial sequence
  Antisense oligomer
uuguuuuucaaauuuugggcagcgg

SEQ ID NO: 1844 - DNA, 25 bp, Artificial sequence
  Antisense oligomer
uguuuuucaaauuuugggcagcggu

SEQ ID NO: 1845 - DNA, 25 bp, Artificial sequence
  Antisense oligomer
guuuuucaaauuuugggcagcggua

SEQ ID NO: 1846 - DNA, 25 bp, Artificial sequence
  Antisense oligomer
uuuuucaaauuuugggcagcgguaa

SEQ ID NO: 1847 - DNA, 25 bp, Artificial sequence
  Antisense oligomer
uuuucaaauuuugggcagcgguaau

SEQ ID NO: 1848 - DNA, 25 bp, Artificial sequence
  Antisense oligomer
uuucaaauuuugggcagcgguaaug

SEQ ID NO: 1849 - DNA, 25 bp, Artificial sequence
  Antisense oligomer
uucaaauuuugggcagcgguaauga

SEQ ID NO: 1850 - DNA, 25 bp, Artificial sequence
  Antisense oligomer
ucaaauuuugggcagcgguaaugag

SEQ ID NO: 1851 - DNA, 25 bp, Artificial sequence
  Antisense oligomer
caaauuuugggcagcgguaaugagu

SEQ ID NO: 1852 - DNA, 25 bp, Artificial sequence
  Antisense oligomer
aaauuuugggcagcgguaaugaguu

SEQ ID NO: 1853 - DNA, 25 bp, Artificial sequence
  Antisense oligomer
aauuuugggcagcgguaaugaguuc

SEQ ID NO: 1854 - DNA, 25 bp, Artificial sequence
  Antisense oligomer
auuuugggcagcgguaaugaguucu

SEQ ID NO: 1855 - DNA, 25 bp, Artificial sequence
  Antisense oligomer
ccauuguguugaauccuuuaacauu

SEQ ID NO: 1856 - DNA, 22 bp, Artificial sequence
  Antisense oligomer
ccauuguguugaauccuuuaac

SEQ ID NO: 1857 - DNA, 20 bp, Artificial sequence
  Antisense oligomer
auuguguugaauccuuuaac

SEQ ID NO: 1858 - DNA, 20 bp, Artificial sequence
  Antisense oligomer
ccuguccuaagaccugcuca

SEQ ID NO: 1859 - DNA, 25 bp, Artificial sequence
  Antisense oligomer
cuuuuggauugcaucuacuguauag

SEQ ID NO: 1860 - DNA, 25 bp, Artificial sequence
  Antisense oligomer
cauucaacuguugccuccgguucug

SEQ ID NO: 1861 - DNA, 24 bp, Artificial sequence
  Antisense oligomer
cuguugccuccgguucugaaggug

SEQ ID NO: 1862 - DNA, 31 bp, Artificial sequence; identical to SEQ ID NO: 275
  Antisense oligomer

SEQ ID NO: 1863 - DNA, 25 bp, Artificial sequence
  Antisense oligomer
cugaagguguucuuguacuucaucc

SEQ ID NO: 1864 - DNA, 27 bp, Artificial sequence
  Antisense oligomer
uguauagggacccuccuuccaugacuc

SEQ ID NO: 1865 - DNA, 20 bp, Artificial sequence
  Antisense oligomer
aucccacugauucugaauuc

SEQ ID NO: 1866 - DNA, 22 bp, Artificial sequence
  Antisense oligomer
uuggcucuggccuguccuaaga

SEQ ID NO: 1867 - DNA, 35 bp, Artificial sequence
  Antisense oligomer
aagaccugcucagcuucuuccuuagcuuccagcca

SEQ ID NO: 1868 - DNA, 20 bp, Artificial sequence
  Antisense oligomer
ggagagagcuuccuguagcu

SEQ ID NO: 1869 - DNA, 23 bp, Artificial sequence
  Antisense oligomer
ucacccuuuccacaggcguugca

SEQ ID NO: 1870 - DNA, 32 bp, Artificial sequence
  Antisense oligomer
ugcacuuugcaaugcugcugucuucuugcuau

SEQ ID NO: 1871 - DNA, 35 bp, Artificial sequence
  Antisense oligomer
ucauaaugaaaacgccgccauuucucaacagaucu

SEQ ID NO: 1872 - DNA, 20 bp, Artificial sequence
  Antisense oligomer
uuugugucuuucugagaaac

SEQ ID NO: 1873 - DNA, 30 bp, Artificial sequence
  Antisense oligomer
uuuagcauguucccaauucucaggaauuug

SEQ ID NO: 1874 - DNA, 20 bp, Artificial sequence
  Antisense oligomer
uccuguagaauacuggcauc

SEQ ID NO: 1875 - DNA, 27 bp, Artificial sequence
  Antisense oligomer
ugcagaccuccugccaccgcagauuca

SEQ ID NO: 1876 - DNA, 34 bp, Artificial sequence
  Antisense oligomer
uugcagaccuccugccaccgcagauucaggcuuc

SEQ ID NO: 1877 - DNA, 20 bp, Artificial sequence
  Antisense oligomer
uguuuuugaggauugcugaa

SEQ ID NO: 1878 - DNA, 40 bp, Artificial sequence
  Antisense oligomer
uguucugacaacaguuugccgcugcccaaugccauccugg

SEQ ID NO: 1879 - DNA, 30 bp, Artificial sequence; identical to SEQ ID NO: 285
  Antisense oligomer

SEQ ID NO: 1880 - DNA, 31 bp, Artificial sequence; identical to SEQ ID NO: 286
  Antisense oligomer

SEQ ID NO: 1881 - DNA, 30 bp, Artificial sequence; identical to SEQ ID NO: 287
  Antisense oligomer

SEQ ID NO: 1882 - DNA, 28 bp, Artificial sequence
  Antisense oligomer
cugcuuccuccaaccauaaaacaaauuc

SEQ ID NO: 1883 - DNA, 29 bp, Artificial sequence
  Antisense oligomer
ccacucagagcucagaucuucuaacuucc

SEQ ID NO: 1884 - DNA, 27 bp, Artificial sequence
  Antisense oligomer
cuuccacucagagcucagaucuucuaa

SEQ ID NO: 1885 - DNA, 30 bp, Artificial sequence
  Antisense oligomer
caguccaggagcuaggucaggcugcuuugc

SEQ ID NO: 1886 - DNA, 37 bp, Artificial sequence
  Antisense oligomer
ucuugaaguaaacgguuuaccgccuuccacucagagc

SEQ ID NO: 1887 - DNA, 30 bp, Artificial sequence; identical to SEQ ID NO: 269
  Antisense oligomer

SEQ ID NO: 1888 - DNA, 21 bp, Artificial sequence
  Antisense oligomer
acuggggacgccucuguucca

SEQ ID NO: 1889 - DNA, 20 bp, Artificial sequence
  Antisense oligomer
ccguaaugauuguucuagcc

SEQ ID NO: 1890 - DNA, 25 bp, Artificial sequence
  Antisense oligomer
uuuugggcagcgguaaugaguucuu

SEQ ID NO: 1891 - DNA, 25 bp, Artificial sequence
  Antisense oligomer
uuugggcagcgguaaugaguucuuc

SEQ ID NO: 1892 - DNA, 25 bp, Artificial sequence
  Antisense oligomer
uugggcagcgguaaugaguucuucc

SEQ ID NO: 1893 - DNA, 25 bp, Artificial sequence
  Antisense oligomer
ugggcagcgguaaugaguucuucca

SEQ ID NO: 1894 - DNA, 25 bp, Artificial sequence
  Antisense oligomer
gggcagcgguaaugaguucuuccaa

SEQ ID NO: 1895 - DNA, 25 bp, Artificial sequence
  Antisense oligomer
ggcagcgguaaugaguucuuccaac

SEQ ID NO: 1896 - DNA, 25 bp, Artificial sequence
  Antisense oligomer
gcagcgguaaugaguucuuccaacu

SEQ ID NO: 1897 - DNA, 25 bp, Artificial sequence
  Antisense oligomer
cagcgguaaugaguucuuccaacug

SEQ ID NO: 1898 - DNA, 25 bp, Artificial sequence
  Antisense oligomer
agcgguaaugaguucuuccaacugg

SEQ ID NO: 1899 - DNA, 25 bp, Artificial sequence
  Antisense oligomer
gcgguaaugaguucuuccaacuggg

SEQ ID NO: 1900 - DNA, 25 bp, Artificial sequence
  Antisense oligomer
cgguaaugaguucuuccaacugggg

SEQ ID NO: 1901 - DNA, 25 bp, Artificial sequence
  Antisense oligomer
gguaaugaguucuuccaacugggga

SEQ ID NO: 1902 - DNA, 25 bp, Artificial sequence
  Antisense oligomer
guaaugaguucuuccaacuggggac

SEQ ID NO: 1903 - DNA, 25 bp, Artificial sequence
  Antisense oligomer
uaaugaguucuuccaacuggggacg

SEQ ID NO: 1904 - DNA, 25 bp, Artificial sequence
  Antisense oligomer
aaugaguucuuccaacuggggacgc

SEQ ID NO: 1905 - DNA, 25 bp, Artificial sequence
  Antisense oligomer
augaguucuuccaacuggggacgcc

SEQ ID NO: 1906 - DNA, 25 bp, Artificial sequence
  Antisense oligomer
ugaguucuuccaacuggggacgccu

SEQ ID NO: 1907 - DNA, 25 bp, Artificial sequence
  Antisense oligomer
gaguucuuccaacuggggacgccuc

SEQ ID NO: 1908 - DNA, 25 bp, Artificial sequence
  Antisense oligomer
aguucuuccaacuggggacgccucu

SEQ ID NO: 1909 - DNA, 25 bp, Artificial sequence
  Antisense oligomer
guucuuccaacuggggacgccucug

SEQ ID NO: 1910 - DNA, 25 bp, Artificial sequence
  Antisense oligomer
uucuuccaacuggggacgccucugu

SEQ ID NO: 1911 - DNA, 25 bp, Artificial sequence
  Antisense oligomer
ucuuccaacuggggacgccucuguu

SEQ ID NO: 1912 - DNA, 25 bp, Artificial sequence
  Antisense oligomer
cuuccaacuggggacgccucuguuc

SEQ ID NO: 1913 - DNA, 25 bp, Artificial sequence
  Antisense oligomer
uuccaacuggggacgccucuguucc

SEQ ID NO: 1914 - DNA, 20 bp, Artificial sequence
  Antisense oligomer
gauugcuggucuuguuuuuc

SEQ ID NO: 1915 - DNA, 20 bp, Artificial sequence
  Antisense oligomer
ccucuugauugcuggucuug

SEQ ID NO: 1916 - DNA, 22 bp, Artificial sequence
  Antisense oligomer
gguaaugaguucuuccaacugg

SEQ ID NO: 1917 - DNA, 20 bp, Artificial sequence
  Antisense oligomer
acuggggacgccucuguucc

SEQ ID NO: 1918 - DNA, 20 bp, Artificial sequence
  Antisense oligomer
ucaaggaagauggcauuucu

SEQ ID NO: 1919 - DNA, 20 bp, Artificial sequence
  Antisense oligomer
ggccaaaccucggcuuaccu

SEQ ID NO: 1920 - DNA, 25 bp, Artificial sequence
  Antisense oligomer
uuugccgcugcccaaugccauccug

SEQ ID NO: 1921 - DNA, 25 bp, Artificial sequence
  Antisense oligomer
auucaauguucugacaacaguuugc

SEQ ID NO: 1922 - DNA, 25 bp, Artificial sequence
  Antisense oligomer
ccaguugcauucaauguucugacaa

SEQ ID NO: 1923 - DNA, 22 bp, Artificial sequence
  Antisense oligomer
caguugcauucaauguucugac

SEQ ID NO: 1924 - DNA, 20 bp, Artificial sequence
  Antisense oligomer
aguugcauucaauguucuga

SEQ ID NO: 1925 - DNA, 21 bp, Artificial sequence
  Antisense oligomer
gauugcugaauuauuucuucc

SEQ ID NO: 1926 - DNA, 25 bp, Artificial sequence
  Antisense oligomer
gauugcugaauuauuucuuccccag

SEQ ID NO: 1927 - DNA, 25 bp, Artificial sequence
  Antisense oligomer
auugcugaauuauuucuuccccagu

SEQ ID NO: 1928 - DNA, 25 bp, Artificial sequence
  Antisense oligomer
uugcugaauuauuucuuccccaguu

SEQ ID NO: 1929 - DNA, 25 bp, Artificial sequence
  Antisense oligomer
ugcugaauuauuucuuccccaguug

SEQ ID NO: 1930 - DNA, 25 bp, Artificial sequence
  Antisense oligomer
gcugaauuauuucuuccccaguugc

SEQ ID NO: 1931 - DNA, 25 bp, Artificial sequence
  Antisense oligomer
cugaauuauuucuuccccaguugca

SEQ ID NO: 1932 - DNA, 25 bp, Artificial sequence
  Antisense oligomer
ugaauuauuucuuccccaguugcau

SEQ ID NO: 1933 - DNA, 25 bp, Artificial sequence
  Antisense oligomer
gaauuauuucuuccccaguugcauu

SEQ ID NO: 1934 - DNA, 25 bp, Artificial sequence
  Antisense oligomer
aauuauuucuuccccaguugcauuc

SEQ ID NO: 1935 - DNA, 25 bp, Artificial sequence
  Antisense oligomer
auuauuucuuccccaguugcauuca

SEQ ID NO: 1936 - DNA, 25 bp, Artificial sequence
  Antisense oligomer
uuauuucuuccccaguugcauucaa

SEQ ID NO: 1937 - DNA, 25 bp, Artificial sequence
  Antisense oligomer
uauuucuuccccaguugcauucaau

SEQ ID NO: 1938 - DNA, 25 bp, Artificial sequence
  Antisense oligomer
auuucuuccccaguugcauucaaug

SEQ ID NO: 1939 - DNA, 25 bp, Artificial sequence
  Antisense oligomer
uuucuuccccaguugcauucaaugu

SEQ ID NO: 1940 - DNA, 25 bp, Artificial sequence
  Antisense oligomer
uucuuccccaguugcauucaauguu

SEQ ID NO: 1941 - DNA, 25 bp, Artificial sequence
  Antisense oligomer
ucuuccccaguugcauucaauguuc

SEQ ID NO: 1942 - DNA, 25 bp, Artificial sequence
  Antisense oligomer
cuuccccaguugcauucaauguucu

SEQ ID NO: 1943 - DNA, 25 bp, Artificial sequence
  Antisense oligomer
uuccccaguugcauucaauguucug

SEQ ID NO: 1944 - DNA, 25 bp, Artificial sequence
  Antisense oligomer
uccccaguugcauucaauguucuga

SEQ ID NO: 1945 - DNA, 25 bp, Artificial sequence
  Antisense oligomer
ccccaguugcauucaauguucugac

SEQ ID NO: 1946 - DNA, 25 bp, Artificial sequence
  Antisense oligomer
cccaguugcauucaauguucugaca

SEQ ID NO: 1947 - DNA, 25 bp, Artificial sequence
  Antisense oligomer
ccaguugcauucaauguucugacaa

SEQ ID NO: 1948 - DNA, 25 bp, Artificial sequence
  Antisense oligomer
caguugcauucaauguucugacaac

SEQ ID NO: 1949 - DNA, 25 bp, Artificial sequence
  Antisense oligomer
aguugcauucaauguucugacaaca

SEQ ID NO: 1950 - DNA, 20 bp, Artificial sequence
  Antisense oligomer
uccuguagaauacuggcauc

SEQ ID NO: 1951 - DNA, 27 bp, Artificial sequence
  Antisense oligomer
ugcagaccuccugccaccgcagauuca

SEQ ID NO: 1952 - DNA, 34 bp, Artificial sequence; identical to SEQ ID NO: 1876
  Antisense oligomer

SEQ ID NO: 1953 - DNA, 25 bp, Artificial sequence
  Antisense oligomer
guugcauucaauguucugacaacag

SEQ ID NO: 1954 - DNA, 25 bp, Artificial sequence
  Antisense oligomer
uugcauucaauguucugacaacagu

SEQ ID NO: 1955 - DNA, 25 bp, Artificial sequence
  Antisense oligomer
ugcauucaauguucugacaacaguu

SEQ ID NO: 1956 - DNA, 25 bp, Artificial sequence
  Antisense oligomer
gcauucaauguucugacaacaguuu

SEQ ID NO: 1957 - DNA, 25 bp, Artificial sequence
  Antisense oligomer
cauucaauguucugacaacaguuug

SEQ ID NO: 1958 - DNA, 25 bp, Artificial sequence
  Antisense oligomer
auucaauguucugacaacaguuugc

SEQ ID NO: 1959 - DNA, 25 bp, Artificial sequence
  Antisense oligomer
ucaauguucugacaacaguuugccg

SEQ ID NO: 1960 - DNA, 25 bp, Artificial sequence
  Antisense oligomer
caauguucugacaacaguuugccgc

SEQ ID NO: 1961 - DNA, 25 bp, Artificial sequence
  Antisense oligomer
aauguucugacaacaguuugccgcu

SEQ ID NO: 1962 - DNA, 25 bp, Artificial sequence
  Antisense oligomer
auguucugacaacaguuugccgcug

SEQ ID NO: 1963 - DNA, 25 bp, Artificial sequence
  Antisense oligomer
uguucugacaacaguuugccgcugc

SEQ ID NO: 1964 - DNA, 25 bp, Artificial sequence
  Antisense oligomer
guucugacaacaguuugccgcugcc

SEQ ID NO: 1965 - DNA, 25 bp, Artificial sequence
  Antisense oligomer
uucugacaacaguuugccgcugccc

SEQ ID NO: 1966 - DNA, 25 bp, Artificial sequence
  Antisense oligomer
ucugacaacaguuugccgcugccca

SEQ ID NO: 1967 - DNA, 25 bp, Artificial sequence
  Antisense oligomer
cugacaacaguuugccgcugcccaa

SEQ ID NO: 1968 - DNA, 25 bp, Artificial sequence
  Antisense oligomer
ugacaacaguuugccgcugcccaau

SEQ ID NO: 1969 - DNA, 25 bp, Artificial sequence
  Antisense oligomer
gacaacaguuugccgcugcccaaug

SEQ ID NO: 1970 - DNA, 25 bp, Artificial sequence
  Antisense oligomer
acaacaguuugccgcugcccaaugc

SEQ ID NO: 1971 - DNA, 25 bp, Artificial sequence
  Antisense oligomer
caacaguuugccgcugcccaaugcc

SEQ ID NO: 1972 - DNA, 25 bp, Artificial sequence
  Antisense oligomer
aacaguuugccgcugcccaaugcca

SEQ ID NO: 1973 - DNA, 25 bp, Artificial sequence
  Antisense oligomer
acaguuugccgcugcccaaugccau

SEQ ID NO: 1974 - DNA, 25 bp, Artificial sequence
  Antisense oligomer
caguuugccgcugcccaaugccauc

SEQ ID NO: 1975 - DNA, 25 bp, Artificial sequence
  Antisense oligomer
aguuugccgcugcccaaugccaucc

SEQ ID NO: 1976 - DNA, 25 bp, Artificial sequence
  Antisense oligomer
guuugccgcugcccaaugccauccu

SEQ ID NO: 1977 - DNA, 25 bp, Artificial sequence
  Antisense oligomer
uuugccgcugcccaaugccauccug

SEQ ID NO: 1978 - DNA, 25 bp, Artificial sequence
  Antisense oligomer
uugccgcugcccaaugccauccugg

SEQ ID NO: 1979 - DNA, 25 bp, Artificial sequence
  Antisense oligomer
ugccgcugcccaaugccauccugga

SEQ ID NO: 1980 - DNA, 25 bp, Artificial sequence
  Antisense oligomer
gccgcugcccaaugccauccuggag

SEQ ID NO: 1981 - DNA, 25 bp, Artificial sequence
  Antisense oligomer
ccgcugcccaaugccauccuggagu

SEQ ID NO: 1982 - DNA, 25 bp, Artificial sequence
  Antisense oligomer
cgcugcccaaugccauccuggaguu

SEQ ID NO: 1983 - DNA, 20 bp, Artificial sequence
  Antisense oligomer
uguuuuugaggauugcugaa

SEQ ID NO: 1984 - DNA, 40 bp, Artificial sequence; identical to SEQ ID NO: 1878
  Antisense oligomer

SEQ ID NO: 1985 - DNA, 17 bp, Artificial sequence
  Antisense oligomer
gcccaaugccauccugg

SEQ ID NO: 1986 - DNA, 25 bp, Artificial sequence
  Antisense oligomer
agagcagguaccuccaacaucaagg

SEQ ID NO: 1987 - DNA, 25 bp, Artificial sequence
  Antisense oligomer
gagcagguaccuccaacaucaagga

SEQ ID NO: 1988 - DNA, 25 bp, Artificial sequence
  Antisense oligomer
agcagguaccuccaacaucaaggaa

SEQ ID NO: 1989 - DNA, 25 bp, Artificial sequence
  Antisense oligomer
gcagguaccuccaacaucaaggaag

SEQ ID NO: 1990 - DNA, 25 bp, Artificial sequence
  Antisense oligomer
cagguaccuccaacaucaaggaaga

SEQ ID NO: 1991 - DNA, 25 bp, Artificial sequence
  Antisense oligomer
agguaccuccaacaucaaggaagau

SEQ ID NO: 1992 - DNA, 25 bp, Artificial sequence
  Antisense oligomer
gguaccuccaacaucaaggaagaug

SEQ ID NO: 1993 - DNA, 25 bp, Artificial sequence
  Antisense oligomer
guaccuccaacaucaaggaagaugg

SEQ ID NO: 1994 - DNA, 25 bp, Artificial sequence
  Antisense oligomer
uaccuccaacaucaaggaagauggc

SEQ ID NO: 1995 - DNA, 25 bp, Artificial sequence
  Antisense oligomer
accuccaacaucaaggaagauggca

SEQ ID NO: 1996 - DNA, 25 bp, Artificial sequence
  Antisense oligomer
ccuccaacaucaaggaagauggcau

SEQ ID NO: 1997 - DNA, 25 bp, Artificial sequence
  Antisense oligomer
cuccaacaucaaggaagauggcauu

SEQ ID NO: 1998 - DNA, 30 bp, Artificial sequence; identical to SEQ ID NO: 263
  Antisense oligomer

SEQ ID NO: 1999 - DNA, 25 bp, Artificial sequence
  Antisense oligomer
uccaacaucaaggaagauggcauuu

SEQ ID NO: 2000 - DNA, 25 bp, Artificial sequence
  Antisense oligomer
ccaacaucaaggaagauggcauuuc

SEQ ID NO: 2001 - DNA, 25 bp, Artificial sequence
  Antisense oligomer
caacaucaaggaagauggcauuucu

SEQ ID NO: 2002 - DNA, 25 bp, Artificial sequence
  Antisense oligomer
aacaucaaggaagauggcauuucua

SEQ ID NO: 2003 - DNA, 25 bp, Artificial sequence
  Antisense oligomer
acaucaaggaagauggcauuucuag

SEQ ID NO: 2004 - DNA, 30 bp, Artificial sequence; identical to SEQ ID NO: 79
  Antisense oligomer

SEQ ID NO: 2005 - DNA, 25 bp, Artificial sequence
  Antisense oligomer
acaucaaggaagauggcauuucuag

SEQ ID NO: 2006 - DNA, 25 bp, Artificial sequence
  Antisense oligomer
caucaaggaagauggcauuucuagu

SEQ ID NO: 2007 - DNA, 25 bp, Artificial sequence
  Antisense oligomer
aucaaggaagauggcauuucuaguu

SEQ ID NO: 2008 - DNA, 25 bp, Artificial sequence
  Antisense oligomer
ucaaggaagauggcauuucuaguuu

SEQ ID NO: 2009 - DNA, 20 bp, Artificial sequence
  Antisense oligomer
ucaaggaagauggcauuucu

SEQ ID NO: 2010 - DNA, 25 bp, Artificial sequence
  Antisense oligomer
caaggaagauggcauuucuaguuug

SEQ ID NO: 2011 - DNA, 25 bp, Artificial sequence
  Antisense oligomer
aaggaagauggcauuucuaguuugg

SEQ ID NO: 2012 - DNA, 25 bp, Artificial sequence
  Antisense oligomer
aggaagauggcauuucuaguuugga

SEQ ID NO: 2013 - DNA, 25 bp, Artificial sequence
  Antisense oligomer
ggaagauggcauuucuaguuuggag

SEQ ID NO: 2014 - DNA, 25 bp, Artificial sequence
  Antisense oligomer
gaagauggcauuucuaguuuggaga

SEQ ID NO: 2015 - DNA, 25 bp, Artificial sequence
  Antisense oligomer
aagauggcauuucuaguuuggagau

SEQ ID NO: 2016 - DNA, 25 bp, Artificial sequence
  Antisense oligomer
agauggcauuucuaguuuggagaug

SEQ ID NO: 2017 - DNA, 25 bp, Artificial sequence
  Antisense oligomer
gauggcauuucuaguuuggagaugg

SEQ ID NO: 2018 - DNA, 25 bp, Artificial sequence
  Antisense oligomer
auggcauuucuaguuuggagauggc

SEQ ID NO: 2019 - DNA, 25 bp, Artificial sequence
  Antisense oligomer
uggcauuucuaguuuggagauggca

SEQ ID NO: 2020 - DNA, 25 bp, Artificial sequence
  Antisense oligomer
ggcauuucuaguuuggagauggcag

SEQ ID NO: 2021 - DNA, 25 bp, Artificial sequence
  Antisense oligomer
gcauuucuaguuuggagauggcagu

SEQ ID NO: 2022 - DNA, 25 bp, Artificial sequence
  Antisense oligomer
cauuucuaguuuggagauggcaguu

SEQ ID NO: 2023 - DNA, 25 bp, Artificial sequence
  Antisense oligomer
auuucuaguuuggagauggcaguuu

SEQ ID NO: 2024 - DNA, 25 bp, Artificial sequence
  Antisense oligomer
uuucuaguuuggagauggcaguuuc

SEQ ID NO: 2025 - DNA, 25 bp, Artificial sequence
  Antisense oligomer
uucuaguuuggagauggcaguuucc

SEQ ID NO: 2026 - DNA, 25 bp, Artificial sequence
  Antisense oligomer
ccauuguguugaauccuuuaacauu

SEQ ID NO: 2027 - DNA, 22 bp, Artificial sequence
  Antisense oligomer
ccauuguguugaauccuuuaac

SEQ ID NO: 2028 - DNA, 20 bp, Artificial sequence
  Antisense oligomer
auuguguugaauccuuuaac

SEQ ID NO: 2029 - DNA, 20 bp, Artificial sequence
  Antisense oligomer
ccuguccuaagaccugcuca

SEQ ID NO: 2030 - DNA, 25 bp, Artificial sequence
  Antisense oligomer
cuuuuggauugcaucuacuguauag

SEQ ID NO: 2031 - DNA, 25 bp, Artificial sequence
  Antisense oligomer
cauucaacuguugccuccgguucug

SEQ ID NO: 2032 - DNA, 24 bp, Artificial sequence
  Antisense oligomer
cuguugccuccgguucugaaggug

SEQ ID NO: 2033 - DNA, 31 bp, Artificial sequence; identical to SEQ ID NO: 275
  Antisense oligomer

SEQ ID NO: 2034 - DNA, 25 bp, Artificial sequence
  Antisense oligomer
cugaagguguucuuguacuucaucc

SEQ ID NO: 2035 - DNA, 27 bp, Artificial sequence
  Antisense oligomer
uguauagggacccuccuuccaugacuc

SEQ ID NO: 2036 - DNA, 20 bp, Artificial sequence
  Antisense oligomer
aucccacugauucugaauuc

SEQ ID NO: 2037 - DNA, 22 bp, Artificial sequence
  Antisense oligomer
uuggcucuggccuguccuaaga

SEQ ID NO: 2038 - DNA, 35 bp, Artificial sequence; identical to SEQ ID NO: 1867
  Antisense oligomer

SEQ ID NO: 2039 - DNA, 23 bp, Artificial sequence
  Antisense oligomer
ugcauguuccagucguugugugg

SEQ ID NO: 2040 - DNA, 25 bp, Artificial sequence
  Antisense oligomer
cacuauuccagucaaauaggucugg

SEQ ID NO: 2041 - DNA, 25 bp, Artificial sequence
  Antisense oligomer
auuuaccaaccuucaggaucgagua

SEQ ID NO: 2042 - DNA, 21 bp, Artificial sequence
  Antisense oligomer
ggccuaaaacacauacacaua

SEQ ID NO: 2043 - DNA, 20 bp, Artificial sequence
  Antisense oligomer
ucagcuucuguuagccacug

SEQ ID NO: 2044 - DNA, 20 bp, Artificial sequence
  Antisense oligomer
uucagcuucuguuagccacu

SEQ ID NO: 2045 - DNA, 21 bp, Artificial sequence
  Antisense oligomer
uucagcuucuguuagccacug

SEQ ID NO: 2046 - DNA, 21 bp, Artificial sequence
  Antisense oligomer
ucagcuucuguuagccacuga

SEQ ID NO: 2047 - DNA, 22 bp, Artificial sequence
  Antisense oligomer
uucagcuucuguuagccacuga

SEQ ID NO: 2048 - DNA, 21 bp, Artificial sequence
  Antisense oligomer
ucagcuucuguuagccacuga

SEQ ID NO: 2049 - DNA, 22 bp, Artificial sequence
  Antisense oligomer
uucagcuucuguuagccacuga

SEQ ID NO: 2050 - DNA, 22 bp, Artificial sequence
  Antisense oligomer
ucagcuucuguuagccacugau

SEQ ID NO: 2051 - DNA, 23 bp, Artificial sequence
  Antisense oligomer
uucagcuucuguuagccacugau

SEQ ID NO: 2052 - DNA, 23 bp, Artificial sequence
  Antisense oligomer
ucagcuucuguuagccacugauu

SEQ ID NO: 2053 - DNA, 24 bp, Artificial sequence
  Antisense oligomer
uucagcuucuguuagccacugauu

SEQ ID NO: 2054 - DNA, 24 bp, Artificial sequence
  Antisense oligomer
ucagcuucuguuagccacugauua

SEQ ID NO: 2055 - DNA, 24 bp, Artificial sequence
  Antisense oligomer
uucagcuucuguuagccacugaua

SEQ ID NO: 2056 - DNA, 25 bp, Artificial sequence
  Antisense oligomer
ucagcuucuguuagccacugauuaa

SEQ ID NO: 2057 - DNA, 26 bp, Artificial sequence
  Antisense oligomer
uucagcuucuguuagccacugauuaa

SEQ ID NO: 2058 - DNA, 26 bp, Artificial sequence
  Antisense oligomer
ucagcuucuguuagccacugauuaaa

SEQ ID NO: 2059 - DNA, 27 bp, Artificial sequence
  Antisense oligomer
uucagcuucuguuagccacugauuaaa

SEQ ID NO: 2060 - DNA, 19 bp, Artificial sequence
  Antisense oligomer
cagcuucuguuagccacug

SEQ ID NO: 2061 - DNA, 21 bp, Artificial sequence
  Antisense oligomer
cagcuucuguuagccacugau

SEQ ID NO: 2062 - DNA, 21 bp, Artificial sequence
  Antisense oligomer
agcuucuguuagccacugauu

SEQ ID NO: 2063 - DNA, 22 bp, Artificial sequence
  Antisense oligomer
cagcuucuguuagccacugauu

SEQ ID NO: 2064 - DNA, 22 bp, Artificial sequence
  Antisense oligomer
agcuucuguuagccacugauua

SEQ ID NO: 2065 - DNA, 23 bp, Artificial sequence
  Antisense oligomer
cagcuucuguuagccacugauua

SEQ ID NO: 2066 - DNA, 23 bp, Artificial sequence
  Antisense oligomer
agcuucuguuagccacugauuaa

SEQ ID NO: 2067 - DNA, 24 bp, Artificial sequence
  Antisense oligomer
cagcuucuguuagccacugauuaa

SEQ ID NO: 2068 - DNA, 24 bp, Artificial sequence
  Antisense oligomer
agcuucuguuagccacugauuaaa

SEQ ID NO: 2069 - DNA, 25 bp, Artificial sequence
  Antisense oligomer
cagcuucuguuagccacugauuaaa

SEQ ID NO: 2070 - DNA, 24 bp, Artificial sequence
  Antisense oligomer
agcuucuguuagccacugauuaaa

SEQ ID NO: 2071 - DNA, 20 bp, Artificial sequence
  Antisense oligomer
agcuucuguuagccacugau

SEQ ID NO: 2072 - DNA, 20 bp, Artificial sequence
  Antisense oligomer
gcuucuguuagccacugauu

SEQ ID NO: 2073 - DNA, 21 bp, Artificial sequence
  Antisense oligomer
agcuucuguuagccacugauu

SEQ ID NO: 2074 - DNA, 21 bp, Artificial sequence
  Antisense oligomer
gcuucuguuagccacugauua

SEQ ID NO: 2075 - DNA, 22 bp, Artificial sequence
  Antisense oligomer
agcuucuguuagccacugauua

SEQ ID NO: 2076 - DNA, 22 bp, Artificial sequence
  Antisense oligomer
gcuucuguuagccacugauuaa

SEQ ID NO: 2077 - DNA, 23 bp, Artificial sequence
  Antisense oligomer
agcuucuguuagccacugauuaa

SEQ ID NO: 2078 - DNA, 23 bp, Artificial sequence
  Antisense oligomer
gcuucuguuagccacugauuaaa

SEQ ID NO: 2079 - DNA, 24 bp, Artificial sequence
  Antisense oligomer
agcuucuguuagccacugauuaaa

SEQ ID NO: 2080 - DNA, 23 bp, Artificial sequence
  Antisense oligomer
gcuucuguuagccacugauuaaa

SEQ ID NO: 2081 - DNA, 23 bp, Artificial sequence
  Antisense oligomer
ccauuuguauuuagcauguuccc

SEQ ID NO: 2082 - DNA, 20 bp, Artificial sequence
  Antisense oligomer
agauaccauuuguauuuagc

SEQ ID NO: 2083 - DNA, 19 bp, Artificial sequence
  Antisense oligomer
gccauuucucaacagaucu

SEQ ID NO: 2084 - DNA, 23 bp, Artificial sequence
  Antisense oligomer
gccauuucucaacagaucuguca

SEQ ID NO: 2085 - DNA, 23 bp, Artificial sequence
  Antisense oligomer
auucucaggaauuugugucuuuc

SEQ ID NO: 2086 - DNA, 21 bp, Artificial sequence
  Antisense oligomer
ucucaggaauuugugucuuuc

SEQ ID NO: 2087 - DNA, 18 bp, Artificial sequence
  Antisense oligomer
guucagcuucuguuagcc

SEQ ID NO: 2088 - DNA, 21 bp, Artificial sequence
  Antisense oligomer
cugauuaaauaucuuuauauc

SEQ ID NO: 2089 - DNA, 18 bp, Artificial sequence
  Antisense oligomer
gccgccauuucucaacag

SEQ ID NO: 2090 - DNA, 18 bp, Artificial sequence
  Antisense oligomer
guauuuagcauguuccca

SEQ ID NO: 2091 - DNA, 18 bp, Artificial sequence
  Antisense oligomer
caggaauuugugucuuuc

SEQ ID NO: 2092 - DNA, 25 bp, Artificial sequence
  Antisense oligomer
gcuuuucuuuuaguugcugcucuuu

SEQ ID NO: 2093 - DNA, 25 bp, Artificial sequence
  Antisense oligomer
cuuuucuuuuaguugcugcucuuuu

SEQ ID NO: 2094 - DNA, 25 bp, Artificial sequence
  Antisense oligomer
uuuucuuuuaguugcugcucuuuuc

SEQ ID NO: 2095 - DNA, 25 bp, Artificial sequence
  Antisense oligomer
uuucuuuuaguugcugcucuuuucc

SEQ ID NO: 2096 - DNA, 25 bp, Artificial sequence
  Antisense oligomer
uucuuuuaguugcugcucuuuucca

SEQ ID NO: 2097 - DNA, 25 bp, Artificial sequence
  Antisense oligomer
ucuuuuaguugcugcucuuuuccag

SEQ ID NO: 2098 - DNA, 25 bp, Artificial sequence
  Antisense oligomer
cuuuuaguugcugcucuuuuccagg

SEQ ID NO: 2099 - DNA, 25 bp, Artificial sequence
  Antisense oligomer
uuuuaguugcugcucuuuuccaggu

SEQ ID NO: 2100 - DNA, 25 bp, Artificial sequence
  Antisense oligomer
uuuaguugcugcucuuuuccagguu

SEQ ID NO: 2101 - DNA, 25 bp, Artificial sequence
  Antisense oligomer
uuaguugcugcucuuuuccagguuc

SEQ ID NO: 2102 - DNA, 25 bp, Artificial sequence
  Antisense oligomer
uaguugcugcucuuuuccagguuca

SEQ ID NO: 2103 - DNA, 25 bp, Artificial sequence
  Antisense oligomer
aguugcugcucuuuuccagguucaa

SEQ ID NO: 2104 - DNA, 25 bp, Artificial sequence
  Antisense oligomer
guugcugcucuuuuccagguucaag

SEQ ID NO: 2105 - DNA, 25 bp, Artificial sequence
  Antisense oligomer
uugcugcucuuuuccagguucaagu

SEQ ID NO: 2106 - DNA, 25 bp, Artificial sequence
  Antisense oligomer
ugcugcucuuuuccagguucaagug

SEQ ID NO: 2107 - DNA, 25 bp, Artificial sequence
  Antisense oligomer
gcugcucuuuuccagguucaagugg

SEQ ID NO: 2108 - DNA, 25 bp, Artificial sequence
  Antisense oligomer
cugcucuuuuccagguucaaguggg

SEQ ID NO: 2109 - DNA, 25 bp, Artificial sequence
  Antisense oligomer
ugcucuuuuccagguucaaguggga

SEQ ID NO: 2110 - DNA, 25 bp, Artificial sequence
  Antisense oligomer
gcucuuuuccagguucaagugggac

SEQ ID NO: 2111 - DNA, 25 bp, Artificial sequence
  Antisense oligomer
cucuuuuccagguucaagugggaua

SEQ ID NO: 2112 - DNA, 25 bp, Artificial sequence
  Antisense oligomer
ucuuuuccagguucaagugggauac

SEQ ID NO: 2113 - DNA, 25 bp, Artificial sequence
  Antisense oligomer
cuuuuccagguucaagugggauacu

SEQ ID NO: 2114 - DNA, 25 bp, Artificial sequence
  Antisense oligomer
uuuuccagguucaagugggauacua

SEQ ID NO: 2115 - DNA, 25 bp, Artificial sequence
  Antisense oligomer
uuuccagguucaagugggauacuag

SEQ ID NO: 2116 - DNA, 25 bp, Artificial sequence
  Antisense oligomer
uuccagguucaagugggauacuagc

SEQ ID NO: 2117 - DNA, 25 bp, Artificial sequence
  Antisense oligomer
uccagguucaagugggauacuagca

SEQ ID NO: 2118 - DNA, 25 bp, Artificial sequence
  Antisense oligomer
ccagguucaagugggauacuagcaa

SEQ ID NO: 2119 - DNA, 25 bp, Artificial sequence
  Antisense oligomer
cagguucaagugggauacuagcaau

SEQ ID NO: 2120 - DNA, 25 bp, Artificial sequence
  Antisense oligomer
agguucaagugggauacuagcaaug

SEQ ID NO: 2121 - DNA, 25 bp, Artificial sequence
  Antisense oligomer
gguucaagugggauacuagcaaugu

SEQ ID NO: 2122 - DNA, 25 bp, Artificial sequence
  Antisense oligomer
guucaagugggauacuagcaauguu

SEQ ID NO: 2123 - DNA, 25 bp, Artificial sequence
  Antisense oligomer
uucaagugggauacuagcaauguua

SEQ ID NO: 2124 - DNA, 25 bp, Artificial sequence
  Antisense oligomer
ucaagugggauacuagcaauguuau

SEQ ID NO: 2125 - DNA, 25 bp, Artificial sequence
  Antisense oligomer
caagugggauacuagcaauguuauc

SEQ ID NO: 2126 - DNA, 25 bp, Artificial sequence
  Antisense oligomer
aagugggauacuagcaauguuaucu

SEQ ID NO: 2127 - DNA, 25 bp, Artificial sequence
  Antisense oligomer
agugggauacuagcaauguuaucug

SEQ ID NO: 2128 - DNA, 25 bp, Artificial sequence
  Antisense oligomer
gugggauacuagcaauguuaucugc

SEQ ID NO: 2129 - DNA, 25 bp, Artificial sequence
  Antisense oligomer
ugggauacuagcaauguuaucugcu

SEQ ID NO: 2130 - DNA, 25 bp, Artificial sequence
  Antisense oligomer
gggauacuagcaauguuaucugcuu

SEQ ID NO: 2131 - DNA, 25 bp, Artificial sequence
  Antisense oligomer
ggauacuagcaauguuaucugcuuc

SEQ ID NO: 2132 - DNA, 25 bp, Artificial sequence
  Antisense oligomer
gauacuagcaauguuaucugcuucc

SEQ ID NO: 2133 - DNA, 25 bp, Artificial sequence
  Antisense oligomer
auacuagcaauguuaucugcuuccu

SEQ ID NO: 2134 - DNA, 25 bp, Artificial sequence
  Antisense oligomer
uacuagcaauguuaucugcuuccuc

SEQ ID NO: 2135 - DNA, 25 bp, Artificial sequence
  Antisense oligomer
acuagcaauguuaucugcuuccucc

SEQ ID NO: 2136 - DNA, 25 bp, Artificial sequence
  Antisense oligomer
cuagcaauguuaucugcuuccucca

SEQ ID NO: 2137 - DNA, 25 bp, Artificial sequence
  Antisense oligomer
uagcaauguuaucugcuuccuccaa

SEQ ID NO: 2138 - DNA, 25 bp, Artificial sequence
  Antisense oligomer
agcaauguuaucugcuuccuccaac

SEQ ID NO: 2139 - DNA, 25 bp, Artificial sequence
  Antisense oligomer
gcaauguuaucugcuuccuccaacc

SEQ ID NO: 2140 - DNA, 25 bp, Artificial sequence
  Antisense oligomer
caauguuaucugcuuccuccaacca

SEQ ID NO: 2141 - DNA, 25 bp, Artificial sequence
  Antisense oligomer
aauguuaucugcuuccuccaaccau

SEQ ID NO: 2142 - DNA, 25 bp, Artificial sequence
  Antisense oligomer
auguuaucugcuuccuccaaccaua

SEQ ID NO: 2143 - DNA, 25 bp, Artificial sequence
  Antisense oligomer
uguuaucugcuuccuccaaccauaa

SEQ ID NO: 2144 - DNA, 25 bp, Artificial sequence
  Antisense oligomer
guuaucugcuuccuccaaccauaaa

SEQ ID NO: 2145 - DNA, 19 bp, Artificial sequence
  Antisense oligomer
gcugcucuuuuccagguuc

SEQ ID NO: 2146 - DNA, 20 bp, Artificial sequence
  Antisense oligomer
ucuuuuccagguucaagugg

SEQ ID NO: 2147 - DNA, 19 bp, Artificial sequence
  Antisense oligomer
agguucaagugggauacua

SEQ ID NO: 2148 - DNA, 21 bp, Artificial sequence
  Antisense oligomer
caauuuuucccacucaguauu

SEQ ID NO: 2149 - DNA, 19 bp, Artificial sequence
  Antisense oligomer
uugaaguuccuggagucuu

SEQ ID NO: 2150 - DNA, 22 bp, Artificial sequence
  Antisense oligomer
uccucaggaggcagcucuaaau

SEQ ID NO: 2151 - DNA, 26 bp, Artificial sequence
  Antisense oligomer
gcgcuggucacaaaauccuguugaac

SEQ ID NO: 2152 - DNA, 27 bp, Artificial sequence
  Antisense oligomer
cacuugcuugaaaaggucuacaaagga

SEQ ID NO: 2153 - DNA, 26 bp, Artificial sequence
  Antisense oligomer
ggugaauaacuuacaaauuuggaagc

SEQ ID NO: 2154 - DNA, 25 bp, Artificial sequence
  Antisense oligomer
ccacaggcguugcacuuugcaaugc

SEQ ID NO: 2155 - DNA, 25 bp, Artificial sequence
  Antisense oligomer
cacaggcguugcacuuugcaaugcu

SEQ ID NO: 2156 - DNA, 25 bp, Artificial sequence
  Antisense oligomer
acaggcguugcacuuugcaaugcug

SEQ ID NO: 2157 - DNA, 25 bp, Artificial sequence
  Antisense oligomer
caggcguugcacuuugcaaugcugc

SEQ ID NO: 2158 - DNA, 25 bp, Artificial sequence
  Antisense oligomer
aggcguugcacuuugcaaugcugcu

SEQ ID NO: 2159 - DNA, 25 bp, Artificial sequence
  Antisense oligomer
ggcguugcacuuugcaaugcugcug

SEQ ID NO: 2160 - DNA, 25 bp, Artificial sequence
  Antisense oligomer
gcguugcacuuugcaaugcugcugu

SEQ ID NO: 2161 - DNA, 25 bp, Artificial sequence
  Antisense oligomer
cguugcacuuugcaaugcugcuguc

SEQ ID NO: 2162 - DNA, 23 bp, Artificial sequence
  Antisense oligomer
cguugcacuuugcaaugcugcug

SEQ ID NO: 2163 - DNA, 25 bp, Artificial sequence
  Antisense oligomer
guugcacuuugcaaugcugcugucu

SEQ ID NO: 2164 - DNA, 25 bp, Artificial sequence
  Antisense oligomer
uugcacuuugcaaugcugcugucuu

SEQ ID NO: 2165 - DNA, 25 bp, Artificial sequence
  Antisense oligomer
ugcacuuugcaaugcugcugucuuc

SEQ ID NO: 2166 - DNA, 25 bp, Artificial sequence
  Antisense oligomer
gcacuuugcaaugcugcugucuucu

SEQ ID NO: 2167 - DNA, 25 bp, Artificial sequence
  Antisense oligomer
cacuuugcaaugcugcugucuucuu

SEQ ID NO: 2168 - DNA, 25 bp, Artificial sequence
  Antisense oligomer
acuuugcaaugcugcugucuucuug

SEQ ID NO: 2169 - DNA, 25 bp, Artificial sequence
  Antisense oligomer
cuuugcaaugcugcugucuucuugc

SEQ ID NO: 2170 - DNA, 25 bp, Artificial sequence
  Antisense oligomer
uuugcaaugcugcugucuucuugcu

SEQ ID NO: 2171 - DNA, 25 bp, Artificial sequence
  Antisense oligomer
uugcaaugcugcugucuucuugcua

SEQ ID NO: 2172 - DNA, 25 bp, Artificial sequence
  Antisense oligomer
ugcaaugcugcugucuucuugcuau

SEQ ID NO: 2173 - DNA, 25 bp, Artificial sequence
  Antisense oligomer
gcaaugcugcugucuucuugcuaug

SEQ ID NO: 2174 - DNA, 25 bp, Artificial sequence
  Antisense oligomer
caaugcugcugucuucuugcuauga

SEQ ID NO: 2175 - DNA, 25 bp, Artificial sequence
  Antisense oligomer
aaugcugcugucuucuugcuaugaa

SEQ ID NO: 2176 - DNA, 25 bp, Artificial sequence
  Antisense oligomer
augcugcugucuucuugcuaugaau

SEQ ID NO: 2177 - DNA, 25 bp, Artificial sequence
  Antisense oligomer
ugcugcugucuucuugcuaugaaua

SEQ ID NO: 2178 - DNA, 25 bp, Artificial sequence
  Antisense oligomer
gcugcugucuucuugcuaugaauaa

SEQ ID NO: 2179 - DNA, 25 bp, Artificial sequence
  Antisense oligomer
cugcugucuucuugcuaugaauaau

SEQ ID NO: 2180 - DNA, 25 bp, Artificial sequence
  Antisense oligomer
ugcugucuucuugcuaugaauaaug

SEQ ID NO: 2181 - DNA, 25 bp, Artificial sequence
  Antisense oligomer
gcugucuucuugcuaugaauaaugu

SEQ ID NO: 2182 - DNA, 25 bp, Artificial sequence
  Antisense oligomer
cugucuucuugcuaugaauaauguc

SEQ ID NO: 2183 - DNA, 25 bp, Artificial sequence
  Antisense oligomer
ugucuucuugcuaugaauaauguca

SEQ ID NO: 2184 - DNA, 25 bp, Artificial sequence
  Antisense oligomer
gucuucuugcuaugaauaaugucaa

SEQ ID NO: 2185 - DNA, 25 bp, Artificial sequence
  Antisense oligomer
ucuucuugcuaugaauaaugucaau

SEQ ID NO: 2186 - DNA, 25 bp, Artificial sequence
  Antisense oligomer
cuucuugcuaugaauaaugucaauc

SEQ ID NO: 2187 - DNA, 25 bp, Artificial sequence
  Antisense oligomer
uucuugcuaugaauaaugucaaucc

SEQ ID NO: 2188 - DNA, 25 bp, Artificial sequence
  Antisense oligomer
ucuugcuaugaauaaugucaauccg

SEQ ID NO: 2189 - DNA, 25 bp, Artificial sequence
  Antisense oligomer
cuugcuaugaauaaugucaauccga

SEQ ID NO: 2190 - DNA, 25 bp, Artificial sequence
  Antisense oligomer
uugcuaugaauaaugucaauccgac

SEQ ID NO: 2191 - DNA, 25 bp, Artificial sequence
  Antisense oligomer
ugcuaugaauaaugucaauccgacc

SEQ ID NO: 2192 - DNA, 25 bp, Artificial sequence
  Antisense oligomer
gcuaugaauaaugucaauccgaccu

SEQ ID NO: 2193 - DNA, 25 bp, Artificial sequence
  Antisense oligomer
cuaugaauaaugucaauccgaccug

SEQ ID NO: 2194 - DNA, 25 bp, Artificial sequence
  Antisense oligomer
uaugaauaaugucaauccgaccuga

SEQ ID NO: 2195 - DNA, 25 bp, Artificial sequence
  Antisense oligomer
augaauaaugucaauccgaccugag

SEQ ID NO: 2196 - DNA, 25 bp, Artificial sequence
  Antisense oligomer
ugaauaaugucaauccgaccugagc

SEQ ID NO: 2197 - DNA, 25 bp, Artificial sequence
  Antisense oligomer
gaauaaugucaauccgaccugagcu

SEQ ID NO: 2198 - DNA, 25 bp, Artificial sequence
  Antisense oligomer
aauaaugucaauccgaccugagcuu

SEQ ID NO: 2199 - DNA, 25 bp, Artificial sequence
  Antisense oligomer
auaaugucaauccgaccugagcuuu

SEQ ID NO: 2200 - DNA, 25 bp, Artificial sequence
  Antisense oligomer
uaaugucaauccgaccugagcuuug

SEQ ID NO: 2201 - DNA, 25 bp, Artificial sequence
  Antisense oligomer
aaugucaauccgaccugagcuuugu

SEQ ID NO: 2202 - DNA, 25 bp, Artificial sequence
  Antisense oligomer
augucaauccgaccugagcuuuguu

SEQ ID NO: 2203 - DNA, 25 bp, Artificial sequence
  Antisense oligomer
ugucaauccgaccugagcuuuguug

SEQ ID NO: 2204 - DNA, 25 bp, Artificial sequence
  Antisense oligomer
gucaauccgaccugagcuuuguugu

SEQ ID NO: 2205 - DNA, 25 bp, Artificial sequence
  Antisense oligomer
ucaauccgaccugagcuuuguugua

SEQ ID NO: 2206 - DNA, 25 bp, Artificial sequence
  Antisense oligomer
caauccgaccugagcuuuguuguag

SEQ ID NO: 2207 - DNA, 25 bp, Artificial sequence
  Antisense oligomer
aauccgaccugagcuuuguuguaga

SEQ ID NO: 2208 - DNA, 25 bp, Artificial sequence
  Antisense oligomer
auccgaccugagcuuuguuguagac

SEQ ID NO: 2209 - DNA, 25 bp, Artificial sequence
  Antisense oligomer
uccgaccugagcuuuguuguagacu

SEQ ID NO: 2210 - DNA, 25 bp, Artificial sequence
  Antisense oligomer
ccgaccugagcuuuguuguagacua

SEQ ID NO: 2211 - DNA, 20 bp, Artificial sequence
  Antisense oligomer
cgaccugagcuuuguuguag

SEQ ID NO: 2212 - DNA, 25 bp, Artificial sequence
  Antisense oligomer
cgaccugagcuuuguuguagacuau

SEQ ID NO: 2213 - DNA, 25 bp, Artificial sequence
  Antisense oligomer
gaccugagcuuuguuguagacuauc

SEQ ID NO: 2214 - DNA, 25 bp, Artificial sequence
  Antisense oligomer
accugagcuuuguuguagacuauca

SEQ ID NO: 2215 - DNA, 23 bp, Artificial sequence
  Antisense oligomer
ccugagcuuuguuguagacuauc

SEQ ID NO: 2216 - DNA, 25 bp, Artificial sequence
  Antisense oligomer
gcuuuucuuuuaguugcugcucuuu

SEQ ID NO: 2217 - DNA, 25 bp, Artificial sequence
  Antisense oligomer
cuuuucuuuuaguugcugcucuuuu

SEQ ID NO: 2218 - DNA, 25 bp, Artificial sequence
  Antisense oligomer
uuuucuuuuaguugcugcucuuuuc

SEQ ID NO: 2219 - DNA, 25 bp, Artificial sequence
  Antisense oligomer
uuucuuuuaguugcugcucuuuucc

SEQ ID NO: 2220 - DNA, 25 bp, Artificial sequence
  Antisense oligomer
uucuuuuaguugcugcucuuuucca

SEQ ID NO: 2221 - DNA, 25 bp, Artificial sequence
  Antisense oligomer
ucuuuuaguugcugcucuuuuccag

SEQ ID NO: 2222 - DNA, 25 bp, Artificial sequence
  Antisense oligomer
cuuuuaguugcugcucuuuuccagg

SEQ ID NO: 2223 - DNA, 25 bp, Artificial sequence
  Antisense oligomer
uuuuaguugcugcucuuuuccaggu

SEQ ID NO: 2224 - DNA, 25 bp, Artificial sequence
  Antisense oligomer
uuuaguugcugcucuuuuccagguu

SEQ ID NO: 2225 - DNA, 25 bp, Artificial sequence
  Antisense oligomer
uuaguugcugcucuuuuccagguuc

SEQ ID NO: 2226 - DNA, 25 bp, Artificial sequence
  Antisense oligomer
uaguugcugcucuuuuccagguuca

SEQ ID NO: 2227 - DNA, 25 bp, Artificial sequence
  Antisense oligomer
aguugcugcucuuuuccagguucaa

SEQ ID NO: 2228 - DNA, 25 bp, Artificial sequence
  Antisense oligomer
guugcugcucuuuuccagguucaag

SEQ ID NO: 2229 - DNA, 25 bp, Artificial sequence
  Antisense oligomer
uugcugcucuuuuccagguucaagu

SEQ ID NO: 2230 - DNA, 25 bp, Artificial sequence
  Antisense oligomer
ugcugcucuuuuccagguucaagug

SEQ ID NO: 2231 - DNA, 25 bp, Artificial sequence
  Antisense oligomer
gcugcucuuuuccagguucaagugg

SEQ ID NO: 2232 - DNA, 25 bp, Artificial sequence
  Antisense oligomer
cugcucuuuuccagguucaaguggg

SEQ ID NO: 2233 - DNA, 25 bp, Artificial sequence
  Antisense oligomer
ugcucuuuuccagguucaaguggga

SEQ ID NO: 2234 - DNA, 25 bp, Artificial sequence
  Antisense oligomer
gcucuuuuccagguucaagugggac

SEQ ID NO: 2235 - DNA, 25 bp, Artificial sequence
  Antisense oligomer
cucuuuuccagguucaagugggaua

SEQ ID NO: 2236 - DNA, 25 bp, Artificial sequence
  Antisense oligomer
ucuuuuccagguucaagugggauac

SEQ ID NO: 2237 - DNA, 20 bp, Artificial sequence
  Antisense oligomer
ucuuuuccagguucaagugg

SEQ ID NO: 2238 - DNA, 25 bp, Artificial sequence
  Antisense oligomer
cuuuuccagguucaagugggauacu

SEQ ID NO: 2239 - DNA, 25 bp, Artificial sequence
  Antisense oligomer
uuuuccagguucaagugggauacua

SEQ ID NO: 2240 - DNA, 25 bp, Artificial sequence
  Antisense oligomer
uuuccagguucaagugggauacuag

SEQ ID NO: 2241 - DNA, 25 bp, Artificial sequence
  Antisense oligomer
uuccagguucaagugggauacuagc

SEQ ID NO: 2242 - DNA, 25 bp, Artificial sequence
  Antisense oligomer
uccagguucaagugggauacuagca

SEQ ID NO: 2243 - DNA, 25 bp, Artificial sequence
  Antisense oligomer
ccagguucaagugggauacuagcaa

SEQ ID NO: 2244 - DNA, 25 bp, Artificial sequence
  Antisense oligomer
cagguucaagugggauacuagcaau

SEQ ID NO: 2245 - DNA, 25 bp, Artificial sequence
  Antisense oligomer
agguucaagugggauacuagcaaug

SEQ ID NO: 2246 - DNA, 25 bp, Artificial sequence
  Antisense oligomer
gguucaagugggauacuagcaaugu

SEQ ID NO: 2247 - DNA, 25 bp, Artificial sequence
  Antisense oligomer
guucaagugggauacuagcaauguu

SEQ ID NO: 2248 - DNA, 25 bp, Artificial sequence
  Antisense oligomer
uucaagugggauacuagcaauguua

SEQ ID NO: 2249 - DNA, 25 bp, Artificial sequence
  Antisense oligomer
ucaagugggauacuagcaauguuau

SEQ ID NO: 2250 - DNA, 25 bp, Artificial sequence
  Antisense oligomer
caagugggauacuagcaauguuauc

SEQ ID NO: 2251 - DNA, 25 bp, Artificial sequence
  Antisense oligomer
aagugggauacuagcaauguuaucu

SEQ ID NO: 2252 - DNA, 25 bp, Artificial sequence
  Antisense oligomer
agugggauacuagcaauguuaucug

SEQ ID NO: 2253 - DNA, 25 bp, Artificial sequence
  Antisense oligomer
gugggauacuagcaauguuaucugc

SEQ ID NO: 2254 - DNA, 25 bp, Artificial sequence
  Antisense oligomer
ugggauacuagcaauguuaucugcu

SEQ ID NO: 2255 - DNA, 25 bp, Artificial sequence
  Antisense oligomer
gggauacuagcaauguuaucugcuu

SEQ ID NO: 2256 - DNA, 25 bp, Artificial sequence
  Antisense oligomer
ggauacuagcaauguuaucugcuuc

SEQ ID NO: 2257 - DNA, 25 bp, Artificial sequence
  Antisense oligomer
gauacuagcaauguuaucugcuucc

SEQ ID NO: 2258 - DNA, 25 bp, Artificial sequence
  Antisense oligomer
auacuagcaauguuaucugcuuccu

SEQ ID NO: 2259 - DNA, 25 bp, Artificial sequence
  Antisense oligomer
uacuagcaauguuaucugcuuccuc

SEQ ID NO: 2260 - DNA, 25 bp, Artificial sequence
  Antisense oligomer
acuagcaauguuaucugcuuccucc

SEQ ID NO: 2261 - DNA, 25 bp, Artificial sequence
  Antisense oligomer
cuagcaauguuaucugcuuccucca

SEQ ID NO: 2262 - DNA, 25 bp, Artificial sequence
  Antisense oligomer
uagcaauguuaucugcuuccuccaa

SEQ ID NO: 2263 - DNA, 25 bp, Artificial sequence
  Antisense oligomer
agcaauguuaucugcuuccuccaac

SEQ ID NO: 2264 - DNA, 25 bp, Artificial sequence
  Antisense oligomer
gcaauguuaucugcuuccuccaacc

SEQ ID NO: 2265 - DNA, 25 bp, Artificial sequence
  Antisense oligomer
caauguuaucugcuuccuccaacca

SEQ ID NO: 2266 - DNA, 25 bp, Artificial sequence
  Antisense oligomer
aauguuaucugcuuccuccaaccau

SEQ ID NO: 2267 - DNA, 25 bp, Artificial sequence
  Antisense oligomer
auguuaucugcuuccuccaaccaua

SEQ ID NO: 2268 - DNA, 25 bp, Artificial sequence
  Antisense oligomer
uguuaucugcuuccuccaaccauaa

SEQ ID NO: 2269 - DNA, 25 bp, Artificial sequence
  Antisense oligomer
ccaauaguggucaguccaggagcua

SEQ ID NO: 2270 - DNA, 25 bp, Artificial sequence
  Antisense oligomer
caauaguggucaguccaggagcuag

SEQ ID NO: 2271 - DNA, 25 bp, Artificial sequence
  Antisense oligomer
aauaguggucaguccaggagcuagg

SEQ ID NO: 2272 - DNA, 25 bp, Artificial sequence
  Antisense oligomer
auaguggucaguccaggagcuaggu

SEQ ID NO: 2273 - DNA, 21 bp, Artificial sequence
  Antisense oligomer
auaguggucaguccaggagcu

SEQ ID NO: 2274 - DNA, 25 bp, Artificial sequence
  Antisense oligomer
uaguggucaguccaggagcuagguc

SEQ ID NO: 2275 - DNA, 25 bp, Artificial sequence
  Antisense oligomer
aguggucaguccaggagcuagguca

SEQ ID NO: 2276 - DNA, 25 bp, Artificial sequence
  Antisense oligomer
guggucaguccaggagcuaggucag

SEQ ID NO: 2277 - DNA, 25 bp, Artificial sequence
  Antisense oligomer
uggucaguccaggagcuaggucagg

SEQ ID NO: 2278 - DNA, 25 bp, Artificial sequence
  Antisense oligomer
ggucaguccaggagcuaggucaggc

SEQ ID NO: 2279 - DNA, 25 bp, Artificial sequence
  Antisense oligomer
gucaguccaggagcuaggucaggcu

SEQ ID NO: 2280 - DNA, 25 bp, Artificial sequence
  Antisense oligomer
ucaguccaggagcuaggucaggcug

SEQ ID NO: 2281 - DNA, 25 bp, Artificial sequence
  Antisense oligomer
caguccaggagcuaggucaggcugc

SEQ ID NO: 2282 - DNA, 25 bp, Artificial sequence
  Antisense oligomer
aguccaggagcuaggucaggcugcu

SEQ ID NO: 2283 - DNA, 25 bp, Artificial sequence
  Antisense oligomer
guccaggagcuaggucaggcugcuu

SEQ ID NO: 2284 - DNA, 25 bp, Artificial sequence
  Antisense oligomer
uccaggagcuaggucaggcugcuuu

SEQ ID NO: 2285 - DNA, 25 bp, Artificial sequence
  Antisense oligomer
ccaggagcuaggucaggcugcuuug

SEQ ID NO: 2286 - DNA, 25 bp, Artificial sequence
  Antisense oligomer
caggagcuaggucaggcugcuuugc

SEQ ID NO: 2287 - DNA, 25 bp, Artificial sequence
  Antisense oligomer
aggagcuaggucaggcugcuuugcc

SEQ ID NO: 2288 - DNA, 25 bp, Artificial sequence
  Antisense oligomer
ggagcuaggucaggcugcuuugccc

SEQ ID NO: 2289 - DNA, 25 bp, Artificial sequence
  Antisense oligomer
gagcuaggucaggcugcuuugcccu

SEQ ID NO: 2290 - DNA, 25 bp, Artificial sequence
  Antisense oligomer
agcuaggucaggcugcuuugcccuc

SEQ ID NO: 2291 - DNA, 25 bp, Artificial sequence
  Antisense oligomer
gcuaggucaggcugcuuugcccuca

SEQ ID NO: 2292 - DNA, 25 bp, Artificial sequence
  Antisense oligomer
cuaggucaggcugcuuugcccucag

SEQ ID NO: 2293 - DNA, 25 bp, Artificial sequence
  Antisense oligomer
uaggucaggcugcuuugcccucagc

SEQ ID NO: 2294 - DNA, 25 bp, Artificial sequence
  Antisense oligomer
aggucaggcugcuuugcccucagcu

SEQ ID NO: 2295 - DNA, 25 bp, Artificial sequence
  Antisense oligomer
ggucaggcugcuuugcccucagcuc

SEQ ID NO: 2296 - DNA, 25 bp, Artificial sequence
  Antisense oligomer
gucaggcugcuuugcccucagcucu

SEQ ID NO: 2297 - DNA, 25 bp, Artificial sequence
  Antisense oligomer
ucaggcugcuuugcccucagcucuu

SEQ ID NO: 2298 - DNA, 25 bp, Artificial sequence
  Antisense oligomer
caggcugcuuugcccucagcucuug

SEQ ID NO: 2299 - DNA, 25 bp, Artificial sequence
  Antisense oligomer
aggcugcuuugcccucagcucuuga

SEQ ID NO: 2300 - DNA, 25 bp, Artificial sequence
  Antisense oligomer
ggcugcuuugcccucagcucuugaa

SEQ ID NO: 2301 - DNA, 25 bp, Artificial sequence
  Antisense oligomer
gcugcuuugcccucagcucuugaag

SEQ ID NO: 2302 - DNA, 25 bp, Artificial sequence
  Antisense oligomer
cugcuuugcccucagcucuugaagu

SEQ ID NO: 2303 - DNA, 25 bp, Artificial sequence
  Antisense oligomer
ugcuuugcccucagcucuugaagua

SEQ ID NO: 2304 - DNA, 25 bp, Artificial sequence
  Antisense oligomer
gcuuugcccucagcucuugaaguaa

SEQ ID NO: 2305 - DNA, 25 bp, Artificial sequence
  Antisense oligomer
cuuugcccucagcucuugaaguaaa

SEQ ID NO: 2306 - DNA, 25 bp, Artificial sequence
  Antisense oligomer
uuugcccucagcucuugaaguaaac

SEQ ID NO: 2307 - DNA, 25 bp, Artificial sequence
  Antisense oligomer
uugcccucagcucuugaaguaaacg

SEQ ID NO: 2308 - DNA, 25 bp, Artificial sequence
  Antisense oligomer
ugcccucagcucuugaaguaaacgg

SEQ ID NO: 2309 - DNA, 25 bp, Artificial sequence
  Antisense oligomer
gcccucagcucuugaaguaaacggu

SEQ ID NO: 2310 - DNA, 25 bp, Artificial sequence
  Antisense oligomer
cccucagcucuugaaguaaacgguu

SEQ ID NO: 2311 - DNA, 20 bp, Artificial sequence
  Antisense oligomer
ccucagcucuugaaguaaac

SEQ ID NO: 2312 - DNA, 21 bp, Artificial sequence
  Antisense oligomer
ccucagcucuugaaguaaacg

SEQ ID NO: 2313 - DNA, 20 bp, Artificial sequence
  Antisense oligomer
cucagcucuugaaguaaacg

SEQ ID NO: 2314 - DNA, 25 bp, Artificial sequence
  Antisense oligomer
guaccuccaacaucaaggaagaugg

SEQ ID NO: 2315 - DNA, 25 bp, Artificial sequence
  Antisense oligomer
uaccuccaacaucaaggaagauggc

SEQ ID NO: 2316 - DNA, 25 bp, Artificial sequence
  Antisense oligomer
accuccaacaucaaggaagauggca

SEQ ID NO: 2317 - DNA, 25 bp, Artificial sequence
  Antisense oligomer
ccuccaacaucaaggaagauggcau

SEQ ID NO: 2318 - DNA, 25 bp, Artificial sequence
  Antisense oligomer
cuccaacaucaaggaagauggcauu

SEQ ID NO: 2319 - DNA, 25 bp, Artificial sequence
  Antisense oligomer
uccaacaucaaggaagauggcauuu

SEQ ID NO: 2320 - DNA, 25 bp, Artificial sequence
  Antisense oligomer
ccaacaucaaggaagauggcauuuc

SEQ ID NO: 2321 - DNA, 25 bp, Artificial sequence
  Antisense oligomer
caacaucaaggaagauggcauuucu

SEQ ID NO: 2322 - DNA, 25 bp, Artificial sequence
  Antisense oligomer
aacaucaaggaagauggcauuucua

SEQ ID NO: 2323 - DNA, 25 bp, Artificial sequence
  Antisense oligomer
acaucaaggaagauggcauuucuag

SEQ ID NO: 2324 - DNA, 25 bp, Artificial sequence
  Antisense oligomer
caucaaggaagauggcauuucuagu

SEQ ID NO: 2325 - DNA, 25 bp, Artificial sequence
  Antisense oligomer
aucaaggaagauggcauuucuaguu

SEQ ID NO: 2326 - DNA, 25 bp, Artificial sequence
  Antisense oligomer
ucaaggaagauggcauuucuaguuu

SEQ ID NO: 2327 - DNA, 25 bp, Artificial sequence
  Antisense oligomer
caaggaagauggcauuucuaguuug

SEQ ID NO: 2328 - DNA, 25 bp, Artificial sequence
  Antisense oligomer
aaggaagauggcauuucuaguuugg

SEQ ID NO: 2329 - DNA, 25 bp, Artificial sequence
  Antisense oligomer
aggaagauggcauuucuaguuugga

SEQ ID NO: 2330 - DNA, 25 bp, Artificial sequence
  Antisense oligomer
ggaagauggcauuucuaguuuggag

SEQ ID NO: 2331 - DNA, 25 bp, Artificial sequence
  Antisense oligomer
gaagauggcauuucuaguuuggaga

SEQ ID NO: 2332 - DNA, 25 bp, Artificial sequence
  Antisense oligomer
aagauggcauuucuaguuuggagau

SEQ ID NO: 2333 - DNA, 25 bp, Artificial sequence
  Antisense oligomer
agauggcauuucuaguuuggagaug

SEQ ID NO: 2334 - DNA, 25 bp, Artificial sequence
  Antisense oligomer
gauggcauuucuaguuuggagaugg

SEQ ID NO: 2335 - DNA, 25 bp, Artificial sequence
  Antisense oligomer
auggcauuucuaguuuggagauggc

SEQ ID NO: 2336 - DNA, 25 bp, Artificial sequence
  Antisense oligomer
uggcauuucuaguuuggagauggca

SEQ ID NO: 2337 - DNA, 25 bp, Artificial sequence
  Antisense oligomer
ggcauuucuaguuuggagauggcag

SEQ ID NO: 2338 - DNA, 25 bp, Artificial sequence
  Antisense oligomer
gcauuucuaguuuggagauggcagu

SEQ ID NO: 2339 - DNA, 25 bp, Artificial sequence
  Antisense oligomer
cauuucuaguuuggagauggcaguu

SEQ ID NO: 2340 - DNA, 25 bp, Artificial sequence
  Antisense oligomer
auuucuaguuuggagauggcaguuu

SEQ ID NO: 2341 - DNA, 25 bp, Artificial sequence
  Antisense oligomer
uuucuaguuuggagauggcaguuuc

SEQ ID NO: 2342 - DNA, 25 bp, Artificial sequence
  Antisense oligomer
uucuaguuuggagauggcaguuucc

SEQ ID NO: 2343 - DNA, 25 bp, Artificial sequence
  Antisense oligomer
ucuaguuuggagauggcaguuuccu

SEQ ID NO: 2344 - DNA, 25 bp, Artificial sequence
  Antisense oligomer
cuaguuuggagauggcaguuuccuu

SEQ ID NO: 2345 - DNA, 25 bp, Artificial sequence
  Antisense oligomer
uaguuuggagauggcaguuuccuua

SEQ ID NO: 2346 - DNA, 25 bp, Artificial sequence
  Antisense oligomer
aguuuggagauggcaguuuccuuag

SEQ ID NO: 2347 - DNA, 25 bp, Artificial sequence
  Antisense oligomer
guuuggagauggcaguuuccuuagu

SEQ ID NO: 2348 - DNA, 25 bp, Artificial sequence
  Antisense oligomer
uuuggagauggcaguuuccuuagua

SEQ ID NO: 2349 - DNA, 25 bp, Artificial sequence
  Antisense oligomer
uuggagauggcaguuuccuuaguaa

SEQ ID NO: 2350 - DNA, 25 bp, Artificial sequence
  Antisense oligomer
uggagauggcaguuuccuuaguaac

SEQ ID NO: 2351 - DNA, 25 bp, Artificial sequence
  Antisense oligomer
gagauggcaguuuccuuaguaacca

SEQ ID NO: 2352 - DNA, 25 bp, Artificial sequence
  Antisense oligomer
agauggcaguuuccuuaguaaccac

SEQ ID NO: 2353 - DNA, 25 bp, Artificial sequence
  Antisense oligomer
gauggcaguuuccuuaguaaccaca

SEQ ID NO: 2354 - DNA, 25 bp, Artificial sequence
  Antisense oligomer
auggcaguuuccuuaguaaccacag

SEQ ID NO: 2355 - DNA, 25 bp, Artificial sequence
  Antisense oligomer
uggcaguuuccuuaguaaccacagg

SEQ ID NO: 2356 - DNA, 25 bp, Artificial sequence
  Antisense oligomer
ggcaguuuccuuaguaaccacaggu

SEQ ID NO: 2357 - DNA, 25 bp, Artificial sequence
  Antisense oligomer
gcaguuuccuuaguaaccacagguu

SEQ ID NO: 2358 - DNA, 25 bp, Artificial sequence
  Antisense oligomer
caguuuccuuaguaaccacagguug

SEQ ID NO: 2359 - DNA, 25 bp, Artificial sequence
  Antisense oligomer
aguuuccuuaguaaccacagguugu

SEQ ID NO: 2360 - DNA, 25 bp, Artificial sequence
  Antisense oligomer
guuuccuuaguaaccacagguugug

SEQ ID NO: 2361 - DNA, 25 bp, Artificial sequence
  Antisense oligomer
uuuccuuaguaaccacagguugugu

SEQ ID NO: 2362 - DNA, 25 bp, Artificial sequence
  Antisense oligomer
uuccuuaguaaccacagguuguguc

SEQ ID NO: 2363 - DNA, 25 bp, Artificial sequence
  Antisense oligomer
uccuuaguaaccacagguuguguca

SEQ ID NO: 2364 - DNA, 25 bp, Artificial sequence
  Antisense oligomer
ccuuaguaaccacagguugugucac

SEQ ID NO: 2365 - DNA, 25 bp, Artificial sequence
  Antisense oligomer
cuuaguaaccacagguugugucacc

SEQ ID NO: 2366 - DNA, 25 bp, Artificial sequence
  Antisense oligomer
uuaguaaccacagguugugucacca

SEQ ID NO: 2367 - DNA, 25 bp, Artificial sequence
  Antisense oligomer
uaguaaccacagguugugucaccag

SEQ ID NO: 2368 - DNA, 25 bp, Artificial sequence
  Antisense oligomer
aguaaccacagguugugucaccaga

SEQ ID NO: 2369 - DNA, 25 bp, Artificial sequence
  Antisense oligomer
guaaccacagguugugucaccagag

SEQ ID NO: 2370 - DNA, 25 bp, Artificial sequence
  Antisense oligomer
uaaccacagguugugucaccagagu

SEQ ID NO: 2371 - DNA, 25 bp, Artificial sequence
  Antisense oligomer
aaccacagguugugucaccagagua

SEQ ID NO: 2372 - DNA, 25 bp, Artificial sequence
  Antisense oligomer
accacagguugugucaccagaguaa

SEQ ID NO: 2373 - DNA, 25 bp, Artificial sequence
  Antisense oligomer
ccacagguugugucaccagaguaac

SEQ ID NO: 2374 - DNA, 25 bp, Artificial sequence
  Antisense oligomer
cacagguugugucaccagaguaaca

SEQ ID NO: 2375 - DNA, 25 bp, Artificial sequence
  Antisense oligomer
acagguugugucaccagaguaacag

SEQ ID NO: 2376 - DNA, 25 bp, Artificial sequence
  Antisense oligomer
cagguugugucaccagaguaacagu

SEQ ID NO: 2377 - DNA, 25 bp, Artificial sequence
  Antisense oligomer
agguugugucaccagaguaacaguc

SEQ ID NO: 2378 - DNA, 25 bp, Artificial sequence
  Antisense oligomer
gguugugucaccagaguaacagucu

SEQ ID NO: 2379 - DNA, 25 bp, Artificial sequence
  Antisense oligomer
guugugucaccagaguaacagucug

SEQ ID NO: 2380 - DNA, 25 bp, Artificial sequence
  Antisense oligomer
uugugucaccagaguaacagucuga

SEQ ID NO: 2381 - DNA, 25 bp, Artificial sequence
  Antisense oligomer
ugugucaccagaguaacagucugag

SEQ ID NO: 2382 - DNA, 25 bp, Artificial sequence
  Antisense oligomer
gugucaccagaguaacagucugagu

SEQ ID NO: 2383 - DNA, 25 bp, Artificial sequence
  Antisense oligomer
ugucaccagaguaacagucugagua

SEQ ID NO: 2384 - DNA, 25 bp, Artificial sequence
  Antisense oligomer
gucaccagaguaacagucugaguag

SEQ ID NO: 2385 - DNA, 25 bp, Artificial sequence
  Antisense oligomer
ucaccagaguaacagucugaguagg

SEQ ID NO: 2386 - DNA, 25 bp, Artificial sequence
  Antisense oligomer
caccagaguaacagucugaguagga

SEQ ID NO: 2387 - DNA, 25 bp, Artificial sequence
  Antisense oligomer
accagaguaacagucugaguaggag

SEQ ID NO: 2388 - DNA, 25 bp, Artificial sequence
  Antisense oligomer
agccucuugauugcuggucuuguuu

SEQ ID NO: 2389 - DNA, 25 bp, Artificial sequence
  Antisense oligomer
gccucuugauugcuggucuuguuuu

SEQ ID NO: 2390 - DNA, 25 bp, Artificial sequence
  Antisense oligomer
ccucuugauugcuggucuuguuuuu

SEQ ID NO: 2391 - DNA, 20 bp, Artificial sequence
  Antisense oligomer
ccucuugauugcuggucuug

SEQ ID NO: 2392 - DNA, 25 bp, Artificial sequence
  Antisense oligomer
cucuugauugcuggucuuguuuuuc

SEQ ID NO: 2393 - DNA, 25 bp, Artificial sequence
  Antisense oligomer
ucuugauugcuggucuuguuuuuca

SEQ ID NO: 2394 - DNA, 25 bp, Artificial sequence
  Antisense oligomer
cuugauugcuggucuuguuuuucaa

SEQ ID NO: 2395 - DNA, 25 bp, Artificial sequence
  Antisense oligomer
uugauugcuggucuuguuuuucaaa

SEQ ID NO: 2396 - DNA, 25 bp, Artificial sequence
  Antisense oligomer
ugauugcuggucuuguuuuucaaau

SEQ ID NO: 2397 - DNA, 25 bp, Artificial sequence
  Antisense oligomer
gauugcuggucuuguuuuucaaauu

SEQ ID NO: 2398 - DNA, 20 bp, Artificial sequence
  Antisense oligomer
gauugcuggucuuguuuuuc

SEQ ID NO: 2399 - DNA, 25 bp, Artificial sequence
  Antisense oligomer
auugcuggucuuguuuuucaaauuu

SEQ ID NO: 2400 - DNA, 25 bp, Artificial sequence
  Antisense oligomer
uugcuggucuuguuuuucaaauuuu

SEQ ID NO: 2401 - DNA, 25 bp, Artificial sequence
  Antisense oligomer
ugcuggucuuguuuuucaaauuuug

SEQ ID NO: 2402 - DNA, 25 bp, Artificial sequence
  Antisense oligomer
gcuggucuuguuuuucaaauuuugg

SEQ ID NO: 2403 - DNA, 25 bp, Artificial sequence
  Antisense oligomer
cuggucuuguuuuucaaauuuuggg

SEQ ID NO: 2404 - DNA, 25 bp, Artificial sequence
  Antisense oligomer
uggucuuguuuuucaaauuuugggc

SEQ ID NO: 2405 - DNA, 25 bp, Artificial sequence
  Antisense oligomer
ggucuuguuuuucaaauuuugggca

SEQ ID NO: 2406 - DNA, 25 bp, Artificial sequence
  Antisense oligomer
gucuuguuuuucaaauuuugggcag

SEQ ID NO: 2407 - DNA, 25 bp, Artificial sequence
  Antisense oligomer
ucuuguuuuucaaauuuugggcagc

SEQ ID NO: 2408 - DNA, 25 bp, Artificial sequence
  Antisense oligomer
cuuguuuuucaaauuuugggcagcg

SEQ ID NO: 2409 - DNA, 25 bp, Artificial sequence
  Antisense oligomer
uuguuuuucaaauuuugggcagcgg

SEQ ID NO: 2410 - DNA, 25 bp, Artificial sequence
  Antisense oligomer
uguuuuucaaauuuugggcagcggu

SEQ ID NO: 2411 - DNA, 25 bp, Artificial sequence
  Antisense oligomer
guuuuucaaauuuugggcagcggua

SEQ ID NO: 2412 - DNA, 25 bp, Artificial sequence
  Antisense oligomer
uuuuucaaauuuugggcagcgguaa

SEQ ID NO: 2413 - DNA, 25 bp, Artificial sequence
  Antisense oligomer
uuuucaaauuuugggcagcgguaau

SEQ ID NO: 2414 - DNA, 25 bp, Artificial sequence
  Antisense oligomer
uuucaaauuuugggcagcgguaaug

SEQ ID NO: 2415 - DNA, 25 bp, Artificial sequence
  Antisense oligomer
uucaaauuuugggcagcgguaauga

SEQ ID NO: 2416 - DNA, 25 bp, Artificial sequence
  Antisense oligomer
ucaaauuuugggcagcgguaaugag

SEQ ID NO: 2417 - DNA, 25 bp, Artificial sequence
  Antisense oligomer
caaauuuugggcagcgguaaugagu

SEQ ID NO: 2418 - DNA, 25 bp, Artificial sequence
  Antisense oligomer
aaauuuugggcagcgguaaugaguu

SEQ ID NO: 2419 - DNA, 25 bp, Artificial sequence
  Antisense oligomer
aauuuugggcagcgguaaugaguuc

SEQ ID NO: 2420 - DNA, 25 bp, Artificial sequence
  Antisense oligomer
auuuugggcagcgguaaugaguucu

SEQ ID NO: 2421 - DNA, 25 bp, Artificial sequence
  Antisense oligomer
uuuugggcagcgguaaugaguucuu

SEQ ID NO: 2422 - DNA, 25 bp, Artificial sequence
  Antisense oligomer
uuugggcagcgguaaugaguucuuc

SEQ ID NO: 2423 - DNA, 25 bp, Artificial sequence
  Antisense oligomer
uugggcagcgguaaugaguucuucc

SEQ ID NO: 2424 - DNA, 25 bp, Artificial sequence
  Antisense oligomer
ugggcagcgguaaugaguucuucca

SEQ ID NO: 2425 - DNA, 25 bp, Artificial sequence
  Antisense oligomer
gggcagcgguaaugaguucuuccaa

SEQ ID NO: 2426 - DNA, 25 bp, Artificial sequence
  Antisense oligomer
ggcagcgguaaugaguucuuccaac

SEQ ID NO: 2427 - DNA, 25 bp, Artificial sequence
  Antisense oligomer
gcagcgguaaugaguucuuccaacu

SEQ ID NO: 2428 - DNA, 25 bp, Artificial sequence
  Antisense oligomer
cagcgguaaugaguucuuccaacug

SEQ ID NO: 2429 - DNA, 25 bp, Artificial sequence
  Antisense oligomer
agcgguaaugaguucuuccaacugg

SEQ ID NO: 2430 - DNA, 25 bp, Artificial sequence
  Antisense oligomer
gcgguaaugaguucuuccaacuggg

SEQ ID NO: 2431 - DNA, 25 bp, Artificial sequence
  Antisense oligomer
cgguaaugaguucuuccaacugggg

SEQ ID NO: 2432 - DNA, 25 bp, Artificial sequence
  Antisense oligomer
gguaaugaguucuuccaacugggga

SEQ ID NO: 2433 - DNA, 22 bp, Artificial sequence
  Antisense oligomer
gguaaugaguucuuccaacugg

SEQ ID NO: 2434 - DNA, 25 bp, Artificial sequence
  Antisense oligomer
guaaugaguucuuccaacuggggac

SEQ ID NO: 2435 - DNA, 25 bp, Artificial sequence
  Antisense oligomer
uaaugaguucuuccaacuggggacg

SEQ ID NO: 2436 - DNA, 25 bp, Artificial sequence
  Antisense oligomer
aaugaguucuuccaacuggggacgc

SEQ ID NO: 2437 - DNA, 25 bp, Artificial sequence
  Antisense oligomer
augaguucuuccaacuggggacgcc

SEQ ID NO: 2438 - DNA, 25 bp, Artificial sequence
  Antisense oligomer
ugaguucuuccaacuggggacgccu

SEQ ID NO: 2439 - DNA, 25 bp, Artificial sequence
  Antisense oligomer
gaguucuuccaacuggggacgccuc

SEQ ID NO: 2440 - DNA, 25 bp, Artificial sequence
  Antisense oligomer
aguucuuccaacuggggacgccucu

SEQ ID NO: 2441 - DNA, 25 bp, Artificial sequence
  Antisense oligomer
guucuuccaacuggggacgccucug

SEQ ID NO: 2442 - DNA, 25 bp, Artificial sequence
  Antisense oligomer
uucuuccaacuggggacgccucugu

SEQ ID NO: 2443 - DNA, 25 bp, Artificial sequence
  Antisense oligomer
ucuuccaacuggggacgccucuguu

SEQ ID NO: 2444 - DNA, 25 bp, Artificial sequence
  Antisense oligomer
cuuccaacuggggacgccucuguuc

SEQ ID NO: 2445 - DNA, 25 bp, Artificial sequence
  Antisense oligomer
uuccaacuggggacgccucuguucc

SEQ ID NO: 2446 - DNA, 25 bp, Artificial sequence
  Antisense oligomer
uccaacuggggacgccucuguucca

SEQ ID NO: 2447 - DNA, 25 bp, Artificial sequence
  Antisense oligomer
ccaacuggggacgccucuguuccaa

SEQ ID NO: 2448 - DNA, 25 bp, Artificial sequence
  Antisense oligomer
caacuggggacgccucuguuccaaa

SEQ ID NO: 2449 - DNA, 25 bp, Artificial sequence
  Antisense oligomer
aacuggggacgccucuguuccaaau

SEQ ID NO: 2450 - DNA, 25 bp, Artificial sequence
  Antisense oligomer
acuggggacgccucuguuccaaauc

SEQ ID NO: 2451 - DNA, 25 bp, Artificial sequence
  Antisense oligomer
cuggggacgccucuguuccaaaucc

SEQ ID NO: 2452 - DNA, 25 bp, Artificial sequence
  Antisense oligomer
uggggacgccucuguuccaaauccu

SEQ ID NO: 2453 - DNA, 25 bp, Artificial sequence
  Antisense oligomer
ggggacgccucuguuccaaauccug

SEQ ID NO: 2454 - DNA, 25 bp, Artificial sequence
  Antisense oligomer
gggacgccucuguuccaaauccugc

SEQ ID NO: 2455 - DNA, 25 bp, Artificial sequence
  Antisense oligomer
ggacgccucuguuccaaauccugca

SEQ ID NO: 2456 - DNA, 25 bp, Artificial sequence
  Antisense oligomer
gacgccucuguuccaaauccugcau

SEQ ID NO: 2457 - DNA, 25 bp, Artificial sequence
  Antisense oligomer
cucuggccuguccuaagaccugcuc

SEQ ID NO: 2458 - DNA, 25 bp, Artificial sequence
  Antisense oligomer
ucuggccuguccuaagaccugcuca

SEQ ID NO: 2459 - DNA, 25 bp, Artificial sequence
  Antisense oligomer
uggccuguccuaagaccugcucagc

SEQ ID NO: 2460 - DNA, 25 bp, Artificial sequence
  Antisense oligomer
ggccuguccuaagaccugcucagcu

SEQ ID NO: 2461 - DNA, 25 bp, Artificial sequence
  Antisense oligomer
gccuguccuaagaccugcucagcuu

SEQ ID NO: 2462 - DNA, 25 bp, Artificial sequence
  Antisense oligomer
ccuguccuaagaccugcucagcuuc

SEQ ID NO: 2463 - DNA, 25 bp, Artificial sequence
  Antisense oligomer
cuguccuaagaccugcucagcuucu

SEQ ID NO: 2464 - DNA, 25 bp, Artificial sequence
  Antisense oligomer
uguccuaagaccugcucagcuucuu

SEQ ID NO: 2465 - DNA, 25 bp, Artificial sequence
  Antisense oligomer
guccuaagaccugcucagcuucuuc

SEQ ID NO: 2466 - DNA, 25 bp, Artificial sequence
  Antisense oligomer
uccuaagaccugcucagcuucuucc

SEQ ID NO: 2467 - DNA, 25 bp, Artificial sequence
  Antisense oligomer
ccuaagaccugcucagcuucuuccu

SEQ ID NO: 2468 - DNA, 25 bp, Artificial sequence
  Antisense oligomer
cuaagaccugcucagcuucuuccuu

SEQ ID NO: 2469 - DNA, 25 bp, Artificial sequence
  Antisense oligomer
uaagaccugcucagcuucuuccuua

SEQ ID NO: 2470 - DNA, 25 bp, Artificial sequence
  Antisense oligomer
aagaccugcucagcuucuuccuuag

SEQ ID NO: 2471 - DNA, 25 bp, Artificial sequence
  Antisense oligomer
agaccugcucagcuucuuccuuagc

SEQ ID NO: 2472 - DNA, 25 bp, Artificial sequence
  Antisense oligomer
gaccugcucagcuucuuccuuagcu

SEQ ID NO: 2473 - DNA, 25 bp, Artificial sequence
  Antisense oligomer
accugcucagcuucuuccuuagcuu

SEQ ID NO: 2474 - DNA, 25 bp, Artificial sequence
  Antisense oligomer
ccugcucagcuucuuccuuagcuuc

SEQ ID NO: 2475 - DNA, 25 bp, Artificial sequence
  Antisense oligomer
cugcucagcuucuuccuuagcuucc

SEQ ID NO: 2476 - DNA, 25 bp, Artificial sequence
  Antisense oligomer
ugcucagcuucuuccuuagcuucca

SEQ ID NO: 2477 - DNA, 25 bp, Artificial sequence
  Antisense oligomer
gcucagcuucuuccuuagcuuccag

SEQ ID NO: 2478 - DNA, 25 bp, Artificial sequence
  Antisense oligomer
cucagcuucuuccuuagcuuccagc

SEQ ID NO: 2479 - DNA, 25 bp, Artificial sequence
  Antisense oligomer
ucagcuucuuccuuagcuuccagcc

SEQ ID NO: 2480 - DNA, 25 bp, Artificial sequence
  Antisense oligomer
cagcuucuuccuuagcuuccagcca

SEQ ID NO: 2481 - DNA, 25 bp, Artificial sequence
  Antisense oligomer
agcuucuuccuuagcuuccagccau

SEQ ID NO: 2482 - DNA, 25 bp, Artificial sequence
  Antisense oligomer
gcuucuuccuuagcuuccagccauu

SEQ ID NO: 2483 - DNA, 25 bp, Artificial sequence
  Antisense oligomer
cuucuuccuuagcuuccagccauug

SEQ ID NO: 2484 - DNA, 25 bp, Artificial sequence
  Antisense oligomer
uucuuccuuagcuuccagccauugu

SEQ ID NO: 2485 - DNA, 25 bp, Artificial sequence
  Antisense oligomer
ucuuccuuagcuuccagccauugug

SEQ ID NO: 2486 - DNA, 25 bp, Artificial sequence
  Antisense oligomer
cuuccuuagcuuccagccauugugu

SEQ ID NO: 2487 - DNA, 25 bp, Artificial sequence
  Antisense oligomer
uuccuuagcuuccagccauuguguu

SEQ ID NO: 2488 - DNA, 25 bp, Artificial sequence
  Antisense oligomer
uccuuagcuuccagccauuguguug

SEQ ID NO: 2489 - DNA, 25 bp, Artificial sequence
  Antisense oligomer
ccuuagcuuccagccauuguguuga

SEQ ID NO: 2490 - DNA, 25 bp, Artificial sequence
  Antisense oligomer
cuuagcuuccagccauuguguugaa

SEQ ID NO: 2491 - DNA, 25 bp, Artificial sequence
  Antisense oligomer
uuagcuuccagccauuguguugaau

SEQ ID NO: 2492 - DNA, 25 bp, Artificial sequence
  Antisense oligomer
uagcuuccagccauuguguugaauc

SEQ ID NO: 2493 - DNA, 25 bp, Artificial sequence
  Antisense oligomer
agcuuccagccauuguguugaaucc

SEQ ID NO: 2494 - DNA, 25 bp, Artificial sequence
  Antisense oligomer
gcuuccagccauuguguugaauccu

SEQ ID NO: 2495 - DNA, 25 bp, Artificial sequence
  Antisense oligomer
cuuccagccauuguguugaauccuu

SEQ ID NO: 2496 - DNA, 25 bp, Artificial sequence
  Antisense oligomer
uuccagccauuguguugaauccuuu

SEQ ID NO: 2497 - DNA, 25 bp, Artificial sequence
  Antisense oligomer
uccagccauuguguugaauccuuua

SEQ ID NO: 2498 - DNA, 25 bp, Artificial sequence
  Antisense oligomer
ccagccauuguguugaauccuuuaa

SEQ ID NO: 2499 - DNA, 25 bp, Artificial sequence
  Antisense oligomer
cagccauuguguugaauccuuuaac

SEQ ID NO: 2500 - DNA, 25 bp, Artificial sequence
  Antisense oligomer
agccauuguguugaauccuuuaaca

SEQ ID NO: 2501 - DNA, 25 bp, Artificial sequence
  Antisense oligomer
gccauuguguugaauccuuuaacau

SEQ ID NO: 2502 - DNA, 25 bp, Artificial sequence
  Antisense oligomer
ccauuguguugaauccuuuaacauu

SEQ ID NO: 2503 - DNA, 25 bp, Artificial sequence
  Antisense oligomer
cauuguguugaauccuuuaacauuu

SEQ ID NO: 2504 - DNA, 20 bp, Artificial sequence
  Antisense oligomer
cauuuuugaccuacaugugg

SEQ ID NO: 2505 - DNA, 20 bp, Artificial sequence
  Antisense oligomer
uuugaccuacauguggaaag

SEQ ID NO: 2506 - DNA, 26 bp, Artificial sequence
  Antisense oligomer
uacauuuuugaccuacauguggaaag

SEQ ID NO: 2507 - DNA, 17 bp, Artificial sequence
  Antisense oligomer
ggucuccuuaccuauga

SEQ ID NO: 2508 - DNA, 24 bp, Artificial sequence
  Antisense oligomer
ucuuaccuaugacuauggaugaga

SEQ ID NO: 2509 - DNA, 22 bp, Artificial sequence
  Antisense oligomer
auuuuugaccuacaugggaaag

SEQ ID NO: 2510 - DNA, 23 bp, Artificial sequence
  Antisense oligomer
uacgaguugauugucggacccag

SEQ ID NO: 2511 - DNA, 25 bp, Artificial sequence
  Antisense oligomer
guggucuccuuaccuaugacugugg

SEQ ID NO: 2512 - DNA, 24 bp, Artificial sequence
  Antisense oligomer
ugucucaguaaucuucuuaccuau

SEQ ID NO: 2513 - DNA, 23 bp, Artificial sequence
  Antisense oligomer
ugcauguuccagucguugugugg

SEQ ID NO: 2514 - DNA, 25 bp, Artificial sequence
  Antisense oligomer
cacuauuccagucaaauaggucugg

SEQ ID NO: 2515 - DNA, 25 bp, Artificial sequence
  Antisense oligomer
auuuaccaaccuucaggaucgagua

SEQ ID NO: 2516 - DNA, 21 bp, Artificial sequence
  Antisense oligomer
ggccuaaaacacauacacaua

SEQ ID NO: 2517 - DNA, 24 bp, Artificial sequence
  Antisense oligomer
cccugaggcauucccaucuugaau

SEQ ID NO: 2518 - DNA, 20 bp, Artificial sequence
  Antisense oligomer
aggacuuacuugcuuuguuu

SEQ ID NO: 2519 - DNA, 23 bp, Artificial sequence
  Antisense oligomer
cuugaauuuaggagauucaucug

SEQ ID NO: 2520 - DNA, 23 bp, Artificial sequence
  Antisense oligomer
caucuucugauaauuuuccuguu

SEQ ID NO: 2521 - DNA, 20 bp, Artificial sequence
  Antisense oligomer
ccauuacaguugucuguguu

SEQ ID NO: 2522 - DNA, 23 bp, Artificial sequence
  Antisense oligomer
ugacagccugugaaaucugugag

SEQ ID NO: 2523 - DNA, 20 bp, Artificial sequence
  Antisense oligomer
uaaucugccucuucuuuugg

SEQ ID NO: 2524 - DNA, 20 bp, Artificial sequence
  Antisense oligomer
cagcaguaguugucaucugc

SEQ ID NO: 2525 - DNA, 27 bp, Artificial sequence
  Antisense oligomer
gccugagcugaucugcuggcaucuugc

SEQ ID NO: 2526 - DNA, 31 bp, Artificial sequence; identical to SEQ ID NO: 165
  Antisense oligomer

SEQ ID NO: 2527 - DNA, 16 bp, Artificial sequence
  Antisense oligomer
ucugcuggcaucuugc

SEQ ID NO: 2528 - DNA, 22 bp, Artificial sequence
  Antisense oligomer
gccgguugacuucauccugugc

SEQ ID NO: 2529 - DNA, 23 bp, Artificial sequence
  Antisense oligomer
gucugcauccaggaacauggguc

SEQ ID NO: 2530 - DNA, 24 bp, Artificial sequence
  Antisense oligomer
uacuuacugucuguagcucuuucu

SEQ ID NO: 2531 - DNA, 22 bp, Artificial sequence
  Antisense oligomer
cugcauccaggaacaugggucc

SEQ ID NO: 2532 - DNA, 24 bp, Artificial sequence
  Antisense oligomer
guugaagaucugauagccgguuga

SEQ ID NO: 2533 - DNA, 20 bp, Artificial sequence
  Antisense oligomer
ucagcuucuguuagccacug

SEQ ID NO: 2534 - DNA, 20 bp, Artificial sequence
  Antisense oligomer
uucagcuucuguuagccacu

SEQ ID NO: 2535 - DNA, 21 bp, Artificial sequence
  Antisense oligomer
uucagcuucuguuagccacug

SEQ ID NO: 2536 - DNA, 21 bp, Artificial sequence
  Antisense oligomer
ucagcuucuguuagccacuga

SEQ ID NO: 2537 - DNA, 22 bp, Artificial sequence
  Antisense oligomer
uucagcuucuguuagccacuga

SEQ ID NO: 2538 - DNA, 21 bp, Artificial sequence
  Antisense oligomer
ucagcuucuguuagccacuga

SEQ ID NO: 2539 - DNA, 22 bp, Artificial sequence
  Antisense oligomer
uucagcuucuguuagccacuga

SEQ ID NO: 2540 - DNA, 22 bp, Artificial sequence
  Antisense oligomer
ucagcuucuguuagccacugau

SEQ ID NO: 2541 - DNA, 23 bp, Artificial sequence
  Antisense oligomer
uucagcuucuguuagccacugau

SEQ ID NO: 2542 - DNA, 23 bp, Artificial sequence
  Antisense oligomer
ucagcuucuguuagccacugauu

SEQ ID NO: 2543 - DNA, 24 bp, Artificial sequence
  Antisense oligomer
uucagcuucuguuagccacugauu

SEQ ID NO: 2544 - DNA, 24 bp, Artificial sequence
  Antisense oligomer
ucagcuucuguuagccacugauua

SEQ ID NO: 2545 - DNA, 24 bp, Artificial sequence
  Antisense oligomer
uucagcuucuguuagccacugaua

SEQ ID NO: 2546 - DNA, 25 bp, Artificial sequence
  Antisense oligomer
ucagcuucuguuagccacugauuaa

SEQ ID NO: 2547 - DNA, 26 bp, Artificial sequence
  Antisense oligomer
uucagcuucuguuagccacugauuaa

SEQ ID NO: 2548 - DNA, 26 bp, Artificial sequence
  Antisense oligomer
ucagcuucuguuagccacugauuaaa

SEQ ID NO: 2549 - DNA, 27 bp, Artificial sequence
  Antisense oligomer
uucagcuucuguuagccacugauuaaa

SEQ ID NO: 2550 - DNA, 19 bp, Artificial sequence
  Antisense oligomer
cagcuucuguuagccacug

SEQ ID NO: 2551 - DNA, 21 bp, Artificial sequence
  Antisense oligomer
cagcuucuguuagccacugau

SEQ ID NO: 2552 - DNA, 21 bp, Artificial sequence
  Antisense oligomer
agcuucuguuagccacugauu

SEQ ID NO: 2553 - DNA, 22 bp, Artificial sequence
  Antisense oligomer
cagcuucuguuagccacugauu

SEQ ID NO: 2554 - DNA, 22 bp, Artificial sequence
  Antisense oligomer
agcuucuguuagccacugauua

SEQ ID NO: 2555 - DNA, 23 bp, Artificial sequence
  Antisense oligomer
cagcuucuguuagccacugauua

SEQ ID NO: 2556 - DNA, 23 bp, Artificial sequence
  Antisense oligomer
agcuucuguuagccacugauuaa

SEQ ID NO: 2557 - DNA, 24 bp, Artificial sequence
  Antisense oligomer
cagcuucuguuagccacugauuaa

SEQ ID NO: 2558 - DNA, 24 bp, Artificial sequence
  Antisense oligomer
agcuucuguuagccacugauuaaa

SEQ ID NO: 2559 - DNA, 25 bp, Artificial sequence
  Antisense oligomer
cagcuucuguuagccacugauuaaa

SEQ ID NO: 2560 - DNA, 24 bp, Artificial sequence
  Antisense oligomer
agcuucuguuagccacugauuaaa

SEQ ID NO: 2561 - DNA, 20 bp, Artificial sequence
  Antisense oligomer
agcuucuguuagccacugau

SEQ ID NO: 2562 - DNA, 20 bp, Artificial sequence
  Antisense oligomer
gcuucuguuagccacugauu

SEQ ID NO: 2563 - DNA, 21 bp, Artificial sequence
  Antisense oligomer
agcuucuguuagccacugauu

SEQ ID NO: 2564 - DNA, 21 bp, Artificial sequence
  Antisense oligomer
gcuucuguuagccacugauua

SEQ ID NO: 2565 - DNA, 22 bp, Artificial sequence
  Antisense oligomer
agcuucuguuagccacugauua

SEQ ID NO: 2566 - DNA, 22 bp, Artificial sequence
  Antisense oligomer
gcuucuguuagccacugauuaa

SEQ ID NO: 2567 - DNA, 23 bp, Artificial sequence
  Antisense oligomer
agcuucuguuagccacugauuaa

SEQ ID NO: 2568 - DNA, 23 bp, Artificial sequence
  Antisense oligomer
gcuucuguuagccacugauuaaa

SEQ ID NO: 2569 - DNA, 24 bp, Artificial sequence
  Antisense oligomer
agcuucuguuagccacugauuaaa

SEQ ID NO: 2570 - DNA, 23 bp, Artificial sequence
  Antisense oligomer
gcuucuguuagccacugauuaaa

SEQ ID NO: 2571 - DNA, 23 bp, Artificial sequence
  Antisense oligomer
ccauuuguauuuagcauguuccc

SEQ ID NO: 2572 - DNA, 20 bp, Artificial sequence
  Antisense oligomer
agauaccauuuguauuuagc

SEQ ID NO: 2573 - DNA, 19 bp, Artificial sequence
  Antisense oligomer
gccauuucucaacagaucu

SEQ ID NO: 2574 - DNA, 23 bp, Artificial sequence
  Antisense oligomer
gccauuucucaacagaucuguca

SEQ ID NO: 2575 - DNA, 23 bp, Artificial sequence
  Antisense oligomer
auucucaggaauuugugucuuuc

SEQ ID NO: 2576 - DNA, 21 bp, Artificial sequence
  Antisense oligomer
ucucaggaauuugugucuuuc

SEQ ID NO: 2577 - DNA, 18 bp, Artificial sequence
  Antisense oligomer
guucagcuucuguuagcc

SEQ ID NO: 2578 - DNA, 21 bp, Artificial sequence
  Antisense oligomer
cugauuaaauaucuuuauauc

SEQ ID NO: 2579 - DNA, 18 bp, Artificial sequence
  Antisense oligomer
gccgccauuucucaacag

SEQ ID NO: 2580 - DNA, 18 bp, Artificial sequence
  Antisense oligomer
gccgccauuucucaacag

SEQ ID NO: 2581 - DNA, 18 bp, Artificial sequence
  Antisense oligomer
caggaauuugugucuuuc

SEQ ID NO: 2582 - DNA, 25 bp, Artificial sequence
  Antisense oligomer
uuugccgcugcccaaugccauccug

SEQ ID NO: 2583 - DNA, 25 bp, Artificial sequence
  Antisense oligomer
auucaauguucugacaacaguuugc

SEQ ID NO: 2584 - DNA, 25 bp, Artificial sequence
  Antisense oligomer
ccaguugcauucaauguucugacaa

SEQ ID NO: 2585 - DNA, 22 bp, Artificial sequence
  Antisense oligomer
caguugcauucaauguucugac

SEQ ID NO: 2586 - DNA, 20 bp, Artificial sequence
  Antisense oligomer
aguugcauucaauguucuga

SEQ ID NO: 2587 - DNA, 21 bp, Artificial sequence
  Antisense oligomer
gauugcugaauuauuucuucc

SEQ ID NO: 2588 - DNA, 25 bp, Artificial sequence
  Antisense oligomer
gauugcugaauuauuucuuccccag

SEQ ID NO: 2589 - DNA, 25 bp, Artificial sequence
  Antisense oligomer
auugcugaauuauuucuuccccagu

SEQ ID NO: 2590 - DNA, 25 bp, Artificial sequence
  Antisense oligomer
uugcugaauuauuucuuccccaguu

SEQ ID NO: 2591 - DNA, 25 bp, Artificial sequence
  Antisense oligomer
ugcugaauuauuucuuccccaguug

SEQ ID NO: 2592 - DNA, 25 bp, Artificial sequence
  Antisense oligomer
gcugaauuauuucuuccccaguugc

SEQ ID NO: 2593 - DNA, 25 bp, Artificial sequence
  Antisense oligomer
cugaauuauuucuuccccaguugca

SEQ ID NO: 2594 - DNA, 25 bp, Artificial sequence
  Antisense oligomer
ugaauuauuucuuccccaguugcau

SEQ ID NO: 2595 - DNA, 25 bp, Artificial sequence
  Antisense oligomer
gaauuauuucuuccccaguugcauu

SEQ ID NO: 2596 - DNA, 25 bp, Artificial sequence
  Antisense oligomer
aauuauuucuuccccaguugcauuc

SEQ ID NO: 2597 - DNA, 25 bp, Artificial sequence
  Antisense oligomer
auuauuucuuccccaguugcauuca

SEQ ID NO: 2598 - DNA, 25 bp, Artificial sequence
  Antisense oligomer
uuauuucuuccccaguugcauucaa

SEQ ID NO: 2599 - DNA, 25 bp, Artificial sequence
  Antisense oligomer
uauuucuuccccaguugcauucaau

SEQ ID NO: 2600 - DNA, 25 bp, Artificial sequence
  Antisense oligomer
auuucuuccccaguugcauucaaug

SEQ ID NO: 2601 - DNA, 25 bp, Artificial sequence
  Antisense oligomer
uuucuuccccaguugcauucaaugu

SEQ ID NO: 2602 - DNA, 25 bp, Artificial sequence
  Antisense oligomer
uucuuccccaguugcauucaauguu

SEQ ID NO: 2603 - DNA, 25 bp, Artificial sequence
  Antisense oligomer
ucuuccccaguugcauucaauguuc

SEQ ID NO: 2604 - DNA, 25 bp, Artificial sequence
  Antisense oligomer
cuuccccaguugcauucaauguucu

SEQ ID NO: 2605 - DNA, 25 bp, Artificial sequence
  Antisense oligomer
uuccccaguugcauucaauguucug

SEQ ID NO: 2606 - DNA, 25 bp, Artificial sequence
  Antisense oligomer
uccccaguugcauucaauguucuga

SEQ ID NO: 2607 - DNA, 25 bp, Artificial sequence
  Antisense oligomer
ccccaguugcauucaauguucugac

SEQ ID NO: 2608 - DNA, 25 bp, Artificial sequence
  Antisense oligomer
cccaguugcauucaauguucugaca

SEQ ID NO: 2609 - DNA, 25 bp, Artificial sequence
  Antisense oligomer
ccaguugcauucaauguucugacaa

SEQ ID NO: 2610 - DNA, 25 bp, Artificial sequence
  Antisense oligomer
caguugcauucaauguucugacaac

SEQ ID NO: 2611 - DNA, 25 bp, Artificial sequence
  Antisense oligomer
aguugcauucaauguucugacaaca

SEQ ID NO: 2612 - DNA, 20 bp, Artificial sequence
  Antisense oligomer
uccuguagaauacuggcauc

SEQ ID NO: 2613 - DNA, 27 bp, Artificial sequence
  Antisense oligomer
ugcagaccuccugccaccgcagauuca

SEQ ID NO: 2614 - DNA, 34 bp, Artificial sequence; identical to SEQ ID NO: 1876
  Antisense oligomer

SEQ ID NO: 2615 - DNA, 25 bp, Artificial sequence
  Antisense oligomer
guugcauucaauguucugacaacag

SEQ ID NO: 2616 - DNA, 25 bp, Artificial sequence
  Antisense oligomer
uugcauucaauguucugacaacagu

SEQ ID NO: 2617 - DNA, 25 bp, Artificial sequence
  Antisense oligomer
ugcauucaauguucugacaacaguu

SEQ ID NO: 2618 - DNA, 25 bp, Artificial sequence
  Antisense oligomer
gcauucaauguucugacaacaguuu

SEQ ID NO: 2619 - DNA, 25 bp, Artificial sequence
  Antisense oligomer
cauucaauguucugacaacaguuug

SEQ ID NO: 2620 - DNA, 25 bp, Artificial sequence
  Antisense oligomer
auucaauguucugacaacaguuugc

SEQ ID NO: 2621 - DNA, 25 bp, Artificial sequence
  Antisense oligomer
ucaauguucugacaacaguuugccg

SEQ ID NO: 2622 - DNA, 25 bp, Artificial sequence
  Antisense oligomer
caauguucugacaacaguuugccgc

SEQ ID NO: 2623 - DNA, 25 bp, Artificial sequence
  Antisense oligomer
aauguucugacaacaguuugccgcu

SEQ ID NO: 2624 - DNA, 25 bp, Artificial sequence
  Antisense oligomer
auguucugacaacaguuugccgcug

SEQ ID NO: 2625 - DNA, 25 bp, Artificial sequence
  Antisense oligomer
uguucugacaacaguuugccgcugc

SEQ ID NO: 2626 - DNA, 25 bp, Artificial sequence
  Antisense oligomer
guucugacaacaguuugccgcugcc

SEQ ID NO: 2627 - DNA, 25 bp, Artificial sequence
  Antisense oligomer
uucugacaacaguuugccgcugccc

SEQ ID NO: 2628 - DNA, 25 bp, Artificial sequence
  Antisense oligomer
ucugacaacaguuugccgcugccca

SEQ ID NO: 2629 - DNA, 25 bp, Artificial sequence
  Antisense oligomer
cugacaacaguuugccgcugcccaa

SEQ ID NO: 2630 - DNA, 25 bp, Artificial sequence
  Antisense oligomer
ugacaacaguuugccgcugcccaau

SEQ ID NO: 2631 - DNA, 25 bp, Artificial sequence
  Antisense oligomer
gacaacaguuugccgcugcccaaug

SEQ ID NO: 2632 - DNA, 25 bp, Artificial sequence
  Antisense oligomer
acaacaguuugccgcugcccaaugc

SEQ ID NO: 2633 - DNA, 25 bp, Artificial sequence
  Antisense oligomer
caacaguuugccgcugcccaaugcc

SEQ ID NO: 2634 - DNA, 25 bp, Artificial sequence
  Antisense oligomer
aacaguuugccgcugcccaaugcca

SEQ ID NO: 2635 - DNA, 25 bp, Artificial sequence
  Antisense oligomer
acaguuugccgcugcccaaugccau

SEQ ID NO: 2636 - DNA, 25 bp, Artificial sequence
  Antisense oligomer
caguuugccgcugcccaaugccauc

SEQ ID NO: 2637 - DNA, 25 bp, Artificial sequence
  Antisense oligomer
aguuugccgcugcccaaugccaucc

SEQ ID NO: 2638 - DNA, 25 bp, Artificial sequence
  Antisense oligomer
guuugccgcugcccaaugccauccu

SEQ ID NO: 2639 - DNA, 25 bp, Artificial sequence
  Antisense oligomer
uuugccgcugcccaaugccauccug

SEQ ID NO: 2640 - DNA, 25 bp, Artificial sequence
  Antisense oligomer
uugccgcugcccaaugccauccugg

SEQ ID NO: 2641 - DNA, 25 bp, Artificial sequence
  Antisense oligomer
ugccgcugcccaaugccauccugga

SEQ ID NO: 2642 - DNA, 25 bp, Artificial sequence
  Antisense oligomer
gccgcugcccaaugccauccuggag

SEQ ID NO: 2643 - DNA, 25 bp, Artificial sequence
  Antisense oligomer
ccgcugcccaaugccauccuggagu

SEQ ID NO: 2644 - DNA, 25 bp, Artificial sequence
  Antisense oligomer
cgcugcccaaugccauccuggaguu

SEQ ID NO: 2645 - DNA, 20 bp, Artificial sequence
  Antisense oligomer
uguuuuugaggauugcugaa

SEQ ID NO: 2646 - DNA, 40 bp, Artificial sequence; identical to SEQ ID NO: 1878
  Antisense oligomer

SEQ ID NO: 2647 - DNA, 20 bp, Artificial sequence
  Antisense oligomer
cuguugcaguaaucuaugag

SEQ ID NO: 2648 - DNA, 20 bp, Artificial sequence
  Antisense oligomer
ugcaguaaucuaugaguuuc

SEQ ID NO: 2649 - DNA, 18 bp, Artificial sequence
  Antisense oligomer
gagucuucuaggagccuu

SEQ ID NO: 2650 - DNA, 23 bp, Artificial sequence
  Antisense oligomer
ugccauuguuucaucagcucuuu

SEQ ID NO: 2651 - DNA, 20 bp, Artificial sequence
  Antisense oligomer
uccuguaggacauuggcagu

SEQ ID NO: 2652 - DNA, 20 bp, Artificial sequence
  Antisense oligomer
cuuggagucuucuaggagcc

SEQ ID NO: 2653 - DNA, 17 bp, Artificial sequence
  Antisense oligomer
uaggugccugccggcuu

SEQ ID NO: 2654 - DNA, 18 bp, Artificial sequence
  Antisense oligomer
uucagcuguagccacacc

SEQ ID NO: 2655 - DNA, 21 bp, Artificial sequence
  Antisense oligomer
cugaacugcuggaaagucgcc

SEQ ID NO: 2656 - DNA, 30 bp, Artificial sequence
  Antisense oligomer
cuggcuuccaaaugggaccugaaaaagaac

SEQ ID NO: 2657 - DNA, 21 bp, Artificial sequence
  Antisense oligomer
caauuuuucccacucaguauu

SEQ ID NO: 2658 - DNA, 19 bp, Artificial sequence
  Antisense oligomer
uugaaguuccuggagucuu

SEQ ID NO: 2659 - DNA, 22 bp, Artificial sequence
  Antisense oligomer
uccucaggaggcagcucuaaau

SEQ ID NO: 2660 - DNA, 16 bp, Artificial sequence
  Antisense oligomer
uggcucucucccaggg

SEQ ID NO: 2661 - DNA, 27 bp, Artificial sequence
  Antisense oligomer
gagauggcucucucccagggacccugg

SEQ ID NO: 2662 - DNA, 17 bp, Artificial sequence
  Antisense oligomer
gggcacuuuguuuggcg

SEQ ID NO: 2663 - DNA, 19 bp, Artificial sequence
  Antisense oligomer
ggucccagcaaguuguuug

SEQ ID NO: 2664 - DNA, 25 bp, Artificial sequence
  Antisense oligomer
ugggauggucccagcaaguuguuug

SEQ ID NO: 2665 - DNA, 21 bp, Artificial sequence
  Antisense oligomer
guagagcucugucauuuuggg

SEQ ID NO: 2666 - DNA, 25 bp, Artificial sequence
  Antisense oligomer
gcucaagagauccacugcaaaaaac

SEQ ID NO: 2667 - DNA, 26 bp, Artificial sequence
  Antisense oligomer
gccauacguacguaucauaaacauuc

SEQ ID NO: 2668 - DNA, 25 bp, Artificial sequence
  Antisense oligomer
ucugcaggauauccaugggcugguc

SEQ ID NO: 2669 - DNA, 27 bp, Artificial sequence
  Antisense oligomer
gauccucccuguucguccccuauuaug

SEQ ID NO: 2670 - DNA, 24 bp, Artificial sequence
  Antisense oligomer
ugcuuuagacuccuguaccugaua

SEQ ID NO: 2671 - DNA, 18 bp, Artificial sequence
  Antisense oligomer
ggcggccuuuguguugac

SEQ ID NO: 2672 - DNA, 25 bp, Artificial sequence
  Antisense oligomer
ggacaggccuuuauguucgugcugc

SEQ ID NO: 2673 - DNA, 19 bp, Artificial sequence
  Antisense oligomer
ccuuuauguucgugcugcu

SEQ ID NO: 2674 - DNA, 25 bp, Artificial sequence
  Antisense oligomer
ccucagcucuugaaguaaacgguuu

SEQ ID NO: 2675 - DNA, 25 bp, Artificial sequence
  Antisense oligomer
cucagcucuugaaguaaacgguuua

SEQ ID NO: 2676 - DNA, 25 bp, Artificial sequence
  Antisense oligomer
ucagcucuugaaguaaacgguuuac

SEQ ID NO: 2677 - DNA, 25 bp, Artificial sequence
  Antisense oligomer
cagcucuugaaguaaacgguuuacc

SEQ ID NO: 2678 - DNA, 25 bp, Artificial sequence
  Antisense oligomer
agcucuugaaguaaacgguuuaccg

SEQ ID NO: 2679 - DNA, 25 bp, Artificial sequence
  Antisense oligomer
gcucuugaaguaaacgguuuaccgc

SEQ ID NO: 2680 - DNA, 25 bp, Artificial sequence
  Antisense oligomer
cucuugaaguaaacgguuuaccgcc

SEQ ID NO: 2681 - DNA, 25 bp, Artificial sequence
  Antisense oligomer
guaccuccaacaucaaggaagaugg

SEQ ID NO: 2682 - DNA, 25 bp, Artificial sequence
  Antisense oligomer
uaccuccaacaucaaggaagauggc

SEQ ID NO: 2683 - DNA, 25 bp, Artificial sequence
  Antisense oligomer
accuccaacaucaaggaagauggca

SEQ ID NO: 2684 - DNA, 25 bp, Artificial sequence
  Antisense oligomer
ccuccaacaucaaggaagauggcau

SEQ ID NO: 2685 - DNA, 25 bp, Artificial sequence
  Antisense oligomer
cuccaacaucaaggaagauggcauu

SEQ ID NO: 2686 - DNA, 25 bp, Artificial sequence
  Antisense oligomer
uccaacaucaaggaagauggcauuu

SEQ ID NO: 2687 - DNA, 25 bp, Artificial sequence
  Antisense oligomer
ccaacaucaaggaagauggcauuuc

SEQ ID NO: 2688 - DNA, 25 bp, Artificial sequence
  Antisense oligomer
caacaucaaggaagauggcauuucu

SEQ ID NO: 2689 - DNA, 25 bp, Artificial sequence
  Antisense oligomer
aacaucaaggaagauggcauuucua

SEQ ID NO: 2690 - DNA, 25 bp, Artificial sequence
  Antisense oligomer
acaucaaggaagauggcauuucuag

SEQ ID NO: 2691 - DNA, 25 bp, Artificial sequence
  Antisense oligomer
caucaaggaagauggcauuucuagu

SEQ ID NO: 2692 - DNA, 25 bp, Artificial sequence
  Antisense oligomer
aucaaggaagauggcauuucuaguu

SEQ ID NO: 2693 - DNA, 25 bp, Artificial sequence
  Antisense oligomer
ucaaggaagauggcauuucuaguuu

SEQ ID NO: 2694 - DNA, 25 bp, Artificial sequence
  Antisense oligomer
caaggaagauggcauuucuaguuug

SEQ ID NO: 2695 - DNA, 25 bp, Artificial sequence
  Antisense oligomer
aaggaagauggcauuucuaguuugg

SEQ ID NO: 2696 - DNA, 25 bp, Artificial sequence
  Antisense oligomer
aggaagauggcauuucuaguuugga

SEQ ID NO: 2697 - DNA, 25 bp, Artificial sequence
  Antisense oligomer
ggaagauggcauuucuaguuuggag

SEQ ID NO: 2698 - DNA, 25 bp, Artificial sequence
  Antisense oligomer
gaagauggcauuucuaguuuggaga

SEQ ID NO: 2699 - DNA, 25 bp, Artificial sequence
  Antisense oligomer
aagauggcauuucuaguuuggagau

SEQ ID NO: 2700 - DNA, 25 bp, Artificial sequence
  Antisense oligomer
agauggcauuucuaguuuggagaug

SEQ ID NO: 2701 - DNA, 25 bp, Artificial sequence
  Antisense oligomer
gauggcauuucuaguuuggagaugg

SEQ ID NO: 2702 - DNA, 25 bp, Artificial sequence
  Antisense oligomer
auggcauuucuaguuuggagauggc

SEQ ID NO: 2703 - DNA, 25 bp, Artificial sequence
  Antisense oligomer
uggcauuucuaguuuggagauggca

SEQ ID NO: 2704 - DNA, 25 bp, Artificial sequence
  Antisense oligomer
ggcauuucuaguuuggagauggcag

SEQ ID NO: 2705 - DNA, 25 bp, Artificial sequence
  Antisense oligomer
gcauuucuaguuuggagauggcagu

SEQ ID NO: 2706 - DNA, 25 bp, Artificial sequence
  Antisense oligomer
cauuucuaguuuggagauggcaguu

SEQ ID NO: 2707 - DNA, 25 bp, Artificial sequence
  Antisense oligomer
auuucuaguuuggagauggcaguuu

SEQ ID NO: 2708 - DNA, 25 bp, Artificial sequence
  Antisense oligomer
uuucuaguuuggagauggcaguuuc

SEQ ID NO: 2709 - DNA, 25 bp, Artificial sequence
  Antisense oligomer
uucuaguuuggagauggcaguuucc

SEQ ID NO: 2710 - DNA, 25 bp, Artificial sequence
  Antisense oligomer
ucuaguuuggagauggcaguuuccu

SEQ ID NO: 2711 - DNA, 25 bp, Artificial sequence
  Antisense oligomer
cuaguuuggagauggcaguuuccuu

SEQ ID NO: 2712 - DNA, 25 bp, Artificial sequence
  Antisense oligomer
uaguuuggagauggcaguuuccuua

SEQ ID NO: 2713 - DNA, 25 bp, Artificial sequence
  Antisense oligomer
aguuuggagauggcaguuuccuuag

SEQ ID NO: 2714 - DNA, 25 bp, Artificial sequence
  Antisense oligomer
guuuggagauggcaguuuccuuagu

SEQ ID NO: 2715 - DNA, 25 bp, Artificial sequence
  Antisense oligomer
uuuggagauggcaguuuccuuagua

SEQ ID NO: 2716 - DNA, 25 bp, Artificial sequence
  Antisense oligomer
uuggagauggcaguuuccuuaguaa

SEQ ID NO: 2717 - DNA, 25 bp, Artificial sequence
  Antisense oligomer
uggagauggcaguuuccuuaguaac

SEQ ID NO: 2718 - DNA, 25 bp, Artificial sequence
  Antisense oligomer
gagauggcaguuuccuuaguaacca

SEQ ID NO: 2719 - DNA, 25 bp, Artificial sequence
  Antisense oligomer
agauggcaguuuccuuaguaaccac

SEQ ID NO: 2720 - DNA, 25 bp, Artificial sequence
  Antisense oligomer
gauggcaguuuccuuaguaaccaca

SEQ ID NO: 2721 - DNA, 25 bp, Artificial sequence
  Antisense oligomer
auggcaguuuccuuaguaaccacag

SEQ ID NO: 2722 - DNA, 25 bp, Artificial sequence
  Antisense oligomer
uggcaguuuccuuaguaaccacagg

SEQ ID NO: 2723 - DNA, 25 bp, Artificial sequence
  Antisense oligomer
ggcaguuuccuuaguaaccacaggu

SEQ ID NO: 2724 - DNA, 25 bp, Artificial sequence
  Antisense oligomer
gcaguuuccuuaguaaccacagguu

SEQ ID NO: 2725 - DNA, 25 bp, Artificial sequence
  Antisense oligomer
caguuuccuuaguaaccacagguug

SEQ ID NO: 2726 - DNA, 25 bp, Artificial sequence
  Antisense oligomer
aguuuccuuaguaaccacagguugu

SEQ ID NO: 2727 - DNA, 25 bp, Artificial sequence
  Antisense oligomer
guuuccuuaguaaccacagguugug

SEQ ID NO: 2728 - DNA, 25 bp, Artificial sequence
  Antisense oligomer
uuuccuuaguaaccacagguugugu

SEQ ID NO: 2729 - DNA, 25 bp, Artificial sequence
  Antisense oligomer
uuccuuaguaaccacagguuguguc

SEQ ID NO: 2730 - DNA, 25 bp, Artificial sequence
  Antisense oligomer
uccuuaguaaccacagguuguguca

SEQ ID NO: 2731 - DNA, 25 bp, Artificial sequence
  Antisense oligomer
ccuuaguaaccacagguugugucac

SEQ ID NO: 2732 - DNA, 25 bp, Artificial sequence
  Antisense oligomer
cuuaguaaccacagguugugucacc

SEQ ID NO: 2733 - DNA, 25 bp, Artificial sequence
  Antisense oligomer
uuaguaaccacagguugugucacca

SEQ ID NO: 2734 - DNA, 25 bp, Artificial sequence
  Antisense oligomer
uaguaaccacagguugugucaccag

SEQ ID NO: 2735 - DNA, 25 bp, Artificial sequence
  Antisense oligomer
aguaaccacagguugugucaccaga

SEQ ID NO: 2736 - DNA, 25 bp, Artificial sequence
  Antisense oligomer
guaaccacagguugugucaccagag

SEQ ID NO: 2737 - DNA, 25 bp, Artificial sequence
  Antisense oligomer
uaaccacagguugugucaccagagu

SEQ ID NO: 2738 - DNA, 25 bp, Artificial sequence
  Antisense oligomer
aaccacagguugugucaccagagua

SEQ ID NO: 2739 - DNA, 25 bp, Artificial sequence
  Antisense oligomer
accacagguugugucaccagaguaa

SEQ ID NO: 2740 - DNA, 25 bp, Artificial sequence
  Antisense oligomer
ccacagguugugucaccagaguaac

SEQ ID NO: 2741 - DNA, 25 bp, Artificial sequence
  Antisense oligomer
cacagguugugucaccagaguaaca

SEQ ID NO: 2742 - DNA, 25 bp, Artificial sequence
  Antisense oligomer
acagguugugucaccagaguaacag

SEQ ID NO: 2743 - DNA, 25 bp, Artificial sequence
  Antisense oligomer
cagguugugucaccagaguaacagu

SEQ ID NO: 2744 - DNA, 25 bp, Artificial sequence
  Antisense oligomer
agguugugucaccagaguaacaguc

SEQ ID NO: 2745 - DNA, 25 bp, Artificial sequence
  Antisense oligomer
gguugugucaccagaguaacagucu

SEQ ID NO: 2746 - DNA, 25 bp, Artificial sequence
  Antisense oligomer
guugugucaccagaguaacagucug

SEQ ID NO: 2747 - DNA, 25 bp, Artificial sequence
  Antisense oligomer
uugugucaccagaguaacagucuga

SEQ ID NO: 2748 - DNA, 25 bp, Artificial sequence
  Antisense oligomer
ugugucaccagaguaacagucugag

SEQ ID NO: 2749 - DNA, 25 bp, Artificial sequence
  Antisense oligomer
gugucaccagaguaacagucugagu

SEQ ID NO: 2750 - DNA, 25 bp, Artificial sequence
  Antisense oligomer
ugucaccagaguaacagucugagua

SEQ ID NO: 2751 - DNA, 25 bp, Artificial sequence
  Antisense oligomer
gucaccagaguaacagucugaguag

SEQ ID NO: 2752 - DNA, 25 bp, Artificial sequence
  Antisense oligomer
ucaccagaguaacagucugaguagg

SEQ ID NO: 2753 - DNA, 25 bp, Artificial sequence
  Antisense oligomer
caccagaguaacagucugaguagga

SEQ ID NO: 2754 - DNA, 25 bp, Artificial sequence
  Antisense oligomer
accagaguaacagucugaguaggag

SEQ ID NO: 2755 - DNA, 25 bp, Artificial sequence
  Antisense oligomer
uuugccgcugcccaaugccauccug

SEQ ID NO: 2756 - DNA, 25 bp, Artificial sequence
  Antisense oligomer
auucaauguucugacaacaguuugc

SEQ ID NO: 2757 - DNA, 25 bp, Artificial sequence
  Antisense oligomer
ccaguugcauucaauguucugacaa

SEQ ID NO: 2758 - DNA, 22 bp, Artificial sequence
  Antisense oligomer
caguugcauucaauguucugac

SEQ ID NO: 2759 - DNA, 20 bp, Artificial sequence
  Antisense oligomer
aguugcauucaauguucuga

SEQ ID NO: 2760 - DNA, 21 bp, Artificial sequence
  Antisense oligomer
gauugcugaauuauuucuucc

SEQ ID NO: 2761 - DNA, 25 bp, Artificial sequence
  Antisense oligomer
gauugcugaauuauuucuuccccag

SEQ ID NO: 2762 - DNA, 25 bp, Artificial sequence
  Antisense oligomer
auugcugaauuauuucuuccccagu

SEQ ID NO: 2763 - DNA, 25 bp, Artificial sequence
  Antisense oligomer
uugcugaauuauuucuuccccaguu

SEQ ID NO: 2764 - DNA, 25 bp, Artificial sequence
  Antisense oligomer
ugcugaauuauuucuuccccaguug

SEQ ID NO: 2765 - DNA, 25 bp, Artificial sequence
  Antisense oligomer
gcugaauuauuucuuccccaguugc

SEQ ID NO: 2766 - DNA, 25 bp, Artificial sequence
  Antisense oligomer
cugaauuauuucuuccccaguugca

SEQ ID NO: 2767 - DNA, 25 bp, Artificial sequence
  Antisense oligomer
ugaauuauuucuuccccaguugcau

SEQ ID NO: 2768 - DNA, 25 bp, Artificial sequence
  Antisense oligomer
gaauuauuucuuccccaguugcauu

SEQ ID NO: 2769 - DNA, 25 bp, Artificial sequence
  Antisense oligomer
aauuauuucuuccccaguugcauuc

SEQ ID NO: 2770 - DNA, 25 bp, Artificial sequence
  Antisense oligomer
auuauuucuuccccaguugcauuca

SEQ ID NO: 2771 - DNA, 25 bp, Artificial sequence
  Antisense oligomer
uuauuucuuccccaguugcauucaa

SEQ ID NO: 2772 - DNA, 25 bp, Artificial sequence
  Antisense oligomer
uauuucuuccccaguugcauucaau

SEQ ID NO: 2773 - DNA, 25 bp, Artificial sequence
  Antisense oligomer
auuucuuccccaguugcauucaaug

SEQ ID NO: 2774 - DNA, 25 bp, Artificial sequence
  Antisense oligomer
uuucuuccccaguugcauucaaugu

SEQ ID NO: 2775 - DNA, 25 bp, Artificial sequence
  Antisense oligomer
uucuuccccaguugcauucaauguu

SEQ ID NO: 2776 - DNA, 25 bp, Artificial sequence
  Antisense oligomer
ucuuccccaguugcauucaauguuc

SEQ ID NO: 2777 - DNA, 25 bp, Artificial sequence
  Antisense oligomer
cuuccccaguugcauucaauguucu

SEQ ID NO: 2778 - DNA, 25 bp, Artificial sequence
  Antisense oligomer
uuccccaguugcauucaauguucug

SEQ ID NO: 2779 - DNA, 25 bp, Artificial sequence
  Antisense oligomer
uccccaguugcauucaauguucuga

SEQ ID NO: 2780 - DNA, 25 bp, Artificial sequence
  Antisense oligomer
ccccaguugcauucaauguucugac

SEQ ID NO: 2781 - DNA, 25 bp, Artificial sequence
  Antisense oligomer
cccaguugcauucaauguucugaca

SEQ ID NO: 2782 - DNA, 25 bp, Artificial sequence
  Antisense oligomer
ccaguugcauucaauguucugacaa

SEQ ID NO: 2783 - DNA, 25 bp, Artificial sequence
  Antisense oligomer
caguugcauucaauguucugacaac

SEQ ID NO: 2784 - DNA, 25 bp, Artificial sequence
  Antisense oligomer
aguugcauucaauguucugacaaca

SEQ ID NO: 2785 - DNA, 20 bp, Artificial sequence
  Antisense oligomer
uccuguagaauacuggcauc

SEQ ID NO: 2786 - DNA, 27 bp, Artificial sequence
  Antisense oligomer
ugcagaccuccugccaccgcagauuca

SEQ ID NO: 2787 - DNA, 34 bp, Artificial sequence; identical to SEQ ID NO: 1876
  Antisense oligomer

SEQ ID NO: 2788 - DNA, 25 bp, Artificial sequence
  Antisense oligomer
guugcauucaauguucugacaacag

SEQ ID NO: 2789 - DNA, 25 bp, Artificial sequence
  Antisense oligomer
uugcauucaauguucugacaacagu

SEQ ID NO: 2790 - DNA, 25 bp, Artificial sequence
  Antisense oligomer
ugcauucaauguucugacaacaguu

SEQ ID NO: 2791 - DNA, 25 bp, Artificial sequence
  Antisense oligomer
gcauucaauguucugacaacaguuu

SEQ ID NO: 2792 - DNA, 25 bp, Artificial sequence
  Antisense oligomer
cauucaauguucugacaacaguuug

SEQ ID NO: 2793 - DNA, 25 bp, Artificial sequence
  Antisense oligomer
auucaauguucugacaacaguuugc

SEQ ID NO: 2794 - DNA, 25 bp, Artificial sequence
  Antisense oligomer
ucaauguucugacaacaguuugccg

SEQ ID NO: 2795 - DNA, 25 bp, Artificial sequence
  Antisense oligomer
caauguucugacaacaguuugccgc

SEQ ID NO: 2796 - DNA, 25 bp, Artificial sequence
  Antisense oligomer
aauguucugacaacaguuugccgcu

SEQ ID NO: 2797 - DNA, 25 bp, Artificial sequence
  Antisense oligomer
auguucugacaacaguuugccgcug

SEQ ID NO: 2798 - DNA, 25 bp, Artificial sequence
  Antisense oligomer
uguucugacaacaguuugccgcugc

SEQ ID NO: 2799 - DNA, 25 bp, Artificial sequence
  Antisense oligomer
guucugacaacaguuugccgcugcc

SEQ ID NO: 2800 - DNA, 25 bp, Artificial sequence
  Antisense oligomer
uucugacaacaguuugccgcugccc

SEQ ID NO: 2801 - DNA, 25 bp, Artificial sequence
  Antisense oligomer
ucugacaacaguuugccgcugccca

SEQ ID NO: 2802 - DNA, 25 bp, Artificial sequence
  Antisense oligomer
cugacaacaguuugccgcugcccaa

SEQ ID NO: 2803 - DNA, 25 bp, Artificial sequence
  Antisense oligomer
ugacaacaguuugccgcugcccaau

SEQ ID NO: 2804 - DNA, 25 bp, Artificial sequence
  Antisense oligomer
gacaacaguuugccgcugcccaaug

SEQ ID NO: 2805 - DNA, 25 bp, Artificial sequence
  Antisense oligomer
acaacaguuugccgcugcccaaugc

SEQ ID NO: 2806 - DNA, 25 bp, Artificial sequence
  Antisense oligomer
caacaguuugccgcugcccaaugcc

SEQ ID NO: 2807 - DNA, 25 bp, Artificial sequence
  Antisense oligomer
aacaguuugccgcugcccaaugcca

SEQ ID NO: 2808 - DNA, 25 bp, Artificial sequence
  Antisense oligomer
acaguuugccgcugcccaaugccau

SEQ ID NO: 2809 - DNA, 25 bp, Artificial sequence
  Antisense oligomer
caguuugccgcugcccaaugccauc

SEQ ID NO: 2810 - DNA, 25 bp, Artificial sequence
  Antisense oligomer
aguuugccgcugcccaaugccaucc

SEQ ID NO: 2811 - DNA, 25 bp, Artificial sequence
  Antisense oligomer
guuugccgcugcccaaugccauccu

SEQ ID NO: 2812 - DNA, 25 bp, Artificial sequence
  Antisense oligomer
uuugccgcugcccaaugccauccug

SEQ ID NO: 2813 - DNA, 25 bp, Artificial sequence
  Antisense oligomer
uugccgcugcccaaugccauccugg

SEQ ID NO: 2814 - DNA, 25 bp, Artificial sequence
  Antisense oligomer
ugccgcugcccaaugccauccugga

SEQ ID NO: 2815 - DNA, 25 bp, Artificial sequence
  Antisense oligomer
gccgcugcccaaugccauccuggag

SEQ ID NO: 2816 - DNA, 25 bp, Artificial sequence
  Antisense oligomer
ccgcugcccaaugccauccuggagu

SEQ ID NO: 2817 - DNA, 25 bp, Artificial sequence
  Antisense oligomer
cgcugcccaaugccauccuggaguu

SEQ ID NO: 2818 - DNA, 20 bp, Artificial sequence
  Antisense oligomer
uguuuuugaggauugcugaa

SEQ ID NO: 2819 - DNA, 40 bp, Artificial sequence; identical to SEQ ID NO: 1878
  Antisense oligomer

SEQ ID NO: 2820 - DNA, 25 bp, Artificial sequence
  Antisense oligomer
cucuggccuguccuaagaccugcuc

SEQ ID NO: 2821 - DNA, 25 bp, Artificial sequence
  Antisense oligomer
ucuggccuguccuaagaccugcuca

SEQ ID NO: 2822 - DNA, 25 bp, Artificial sequence
  Antisense oligomer
cuggccuguccuaagaccugcucag

SEQ ID NO: 2823 - DNA, 25 bp, Artificial sequence
  Antisense oligomer
uggccuguccuaagaccugcucagc

SEQ ID NO: 2824 - DNA, 25 bp, Artificial sequence
  Antisense oligomer
ggccuguccuaagaccugcucagcu

SEQ ID NO: 2825 - DNA, 25 bp, Artificial sequence
  Antisense oligomer
gccuguccuaagaccugcucagcuu

SEQ ID NO: 2826 - DNA, 25 bp, Artificial sequence
  Antisense oligomer
ccuguccuaagaccugcucagcuuc

SEQ ID NO: 2827 - DNA, 25 bp, Artificial sequence
  Antisense oligomer
cuguccuaagaccugcucagcuucu

SEQ ID NO: 2828 - DNA, 25 bp, Artificial sequence
  Antisense oligomer
uguccuaagaccugcucagcuucuu

SEQ ID NO: 2829 - DNA, 25 bp, Artificial sequence
  Antisense oligomer
guccuaagaccugcucagcuucuuc

SEQ ID NO: 2830 - DNA, 25 bp, Artificial sequence
  Antisense oligomer
uccuaagaccugcucagcuucuucc

SEQ ID NO: 2831 - DNA, 25 bp, Artificial sequence
  Antisense oligomer
ccuaagaccugcucagcuucuuccu

SEQ ID NO: 2832 - DNA, 25 bp, Artificial sequence
  Antisense oligomer
cuaagaccugcucagcuucuuccuu

SEQ ID NO: 2833 - DNA, 25 bp, Artificial sequence
  Antisense oligomer
uaagaccugcucagcuucuuccuua

SEQ ID NO: 2834 - DNA, 25 bp, Artificial sequence
  Antisense oligomer
aagaccugcucagcuucuuccuuag

SEQ ID NO: 2835 - DNA, 25 bp, Artificial sequence
  Antisense oligomer
agaccugcucagcuucuuccuuagc

SEQ ID NO: 2836 - DNA, 25 bp, Artificial sequence
  Antisense oligomer
gaccugcucagcuucuuccuuagcu

SEQ ID NO: 2837 - DNA, 25 bp, Artificial sequence
  Antisense oligomer
accugcucagcuucuuccuuagcuu

SEQ ID NO: 2838 - DNA, 25 bp, Artificial sequence
  Antisense oligomer
ccugcucagcuucuuccuuagcuuc

SEQ ID NO: 2839 - DNA, 25 bp, Artificial sequence
  Antisense oligomer
cugcucagcuucuuccuuagcuucc

SEQ ID NO: 2840 - DNA, 25 bp, Artificial sequence
  Antisense oligomer
ugcucagcuucuuccuuagcuucca

SEQ ID NO: 2841 - DNA, 25 bp, Artificial sequence
  Antisense oligomer
gcucagcuucuuccuuagcuuccag

SEQ ID NO: 2842 - DNA, 25 bp, Artificial sequence
  Antisense oligomer
cucagcuucuuccuuagcuuccagc

SEQ ID NO: 2843 - DNA, 25 bp, Artificial sequence
  Antisense oligomer
ucagcuucuuccuuagcuuccagcc

SEQ ID NO: 2844 - DNA, 25 bp, Artificial sequence
  Antisense oligomer
cagcuucuuccuuagcuuccagcca

SEQ ID NO: 2845 - DNA, 25 bp, Artificial sequence
  Antisense oligomer
agcuucuuccuuagcuuccagccau

SEQ ID NO: 2846 - DNA, 25 bp, Artificial sequence
  Antisense oligomer
gcuucuuccuuagcuuccagccauu

SEQ ID NO: 2847 - DNA, 25 bp, Artificial sequence
  Antisense oligomer
cuucuuccuuagcuuccagccauug

SEQ ID NO: 2848 - DNA, 25 bp, Artificial sequence
  Antisense oligomer
uucuuccuuagcuuccagccauugu

SEQ ID NO: 2849 - DNA, 25 bp, Artificial sequence
  Antisense oligomer
ucuuccuuagcuuccagccauugug

SEQ ID NO: 2850 - DNA, 25 bp, Artificial sequence
  Antisense oligomer
cuuccuuagcuuccagccauugugu

SEQ ID NO: 2851 - DNA, 25 bp, Artificial sequence
  Antisense oligomer
uuccuuagcuuccagccauuguguu

SEQ ID NO: 2852 - DNA, 25 bp, Artificial sequence
  Antisense oligomer
uccuuagcuuccagccauuguguug

SEQ ID NO: 2853 - DNA, 25 bp, Artificial sequence
  Antisense oligomer
ccuuagcuuccagccauuguguuga

SEQ ID NO: 2854 - DNA, 25 bp, Artificial sequence
  Antisense oligomer
cuuagcuuccagccauuguguugaa

SEQ ID NO: 2855 - DNA, 25 bp, Artificial sequence
  Antisense oligomer
uuagcuuccagccauuguguugaau

SEQ ID NO: 2856 - DNA, 25 bp, Artificial sequence
  Antisense oligomer
uagcuuccagccauuguguugaauc

SEQ ID NO: 2857 - DNA, 25 bp, Artificial sequence
  Antisense oligomer
agcuuccagccauuguguugaaucc

SEQ ID NO: 2858 - DNA, 25 bp, Artificial sequence
  Antisense oligomer
gcuuccagccauuguguugaauccu

SEQ ID NO: 2859 - DNA, 25 bp, Artificial sequence
  Antisense oligomer
cuuccagccauuguguugaauccuu

SEQ ID NO: 2860 - DNA, 25 bp, Artificial sequence
  Antisense oligomer
uuccagccauuguguugaauccuuu

SEQ ID NO: 2861 - DNA, 25 bp, Artificial sequence
  Antisense oligomer
uccagccauuguguugaauccuuua

SEQ ID NO: 2862 - DNA, 25 bp, Artificial sequence
  Antisense oligomer
ccagccauuguguugaauccuuuaa

SEQ ID NO: 2863 - DNA, 25 bp, Artificial sequence
  Antisense oligomer
cagccauuguguugaauccuuuaac

SEQ ID NO: 2864 - DNA, 25 bp, Artificial sequence
  Antisense oligomer
agccauuguguugaauccuuuaaca

SEQ ID NO: 2865 - DNA, 25 bp, Artificial sequence
  Antisense oligomer
gccauuguguugaauccuuuaacau

SEQ ID NO: 2866 - DNA, 25 bp, Artificial sequence
  Antisense oligomer
ccauuguguugaauccuuuaacauu

SEQ ID NO: 2867 - DNA, 25 bp, Artificial sequence
  Antisense oligomer
cauuguguugaauccuuuaacauuu

SEQ ID NO: 2868 - DNA, 20 bp, Artificial sequence
  Antisense oligomer
ucagcuucuguuagccacug

SEQ ID NO: 2869 - DNA, 20 bp, Artificial sequence
  Antisense oligomer
uucagcuucuguuagccacu

SEQ ID NO: 2870 - DNA, 21 bp, Artificial sequence
  Antisense oligomer
uucagcuucuguuagccacug

SEQ ID NO: 2871 - DNA, 21 bp, Artificial sequence
  Antisense oligomer
ucagcuucuguuagccacuga

SEQ ID NO: 2872 - DNA, 22 bp, Artificial sequence
  Antisense oligomer
uucagcuucuguuagccacuga

SEQ ID NO: 2873 - DNA, 21 bp, Artificial sequence
  Antisense oligomer
ucagcuucuguuagccacuga

SEQ ID NO: 2874 - DNA, 22 bp, Artificial sequence
  Antisense oligomer
uucagcuucuguuagccacuga

SEQ ID NO: 2875 - DNA, 22 bp, Artificial sequence
  Antisense oligomer
ucagcuucuguuagccacugau

SEQ ID NO: 2876 - DNA, 23 bp, Artificial sequence
  Antisense oligomer
uucagcuucuguuagccacugau

SEQ ID NO: 2877 - DNA, 23 bp, Artificial sequence
  Antisense oligomer
ucagcuucuguuagccacugauu

SEQ ID NO: 2878 - DNA, 24 bp, Artificial sequence
  Antisense oligomer
uucagcuucuguuagccacugauu

SEQ ID NO: 2879 - DNA, 24 bp, Artificial sequence
  Antisense oligomer
ucagcuucuguuagccacugauua

SEQ ID NO: 2880 - DNA, 24 bp, Artificial sequence
  Antisense oligomer
uucagcuucuguuagccacugaua

SEQ ID NO: 2881 - DNA, 25 bp, Artificial sequence
  Antisense oligomer
ucagcuucuguuagccacugauuaa

SEQ ID NO: 2882 - DNA, 26 bp, Artificial sequence
  Antisense oligomer
uucagcuucuguuagccacugauuaa

SEQ ID NO: 2883 - DNA, 26 bp, Artificial sequence
  Antisense oligomer
ucagcuucuguuagccacugauuaaa

SEQ ID NO: 2884 - DNA, 27 bp, Artificial sequence
  Antisense oligomer
uucagcuucuguuagccacugauuaaa

SEQ ID NO: 2885 - DNA, 19 bp, Artificial sequence
  Antisense oligomer
cagcuucuguuagccacug

SEQ ID NO: 2886 - DNA, 21 bp, Artificial sequence
  Antisense oligomer
cagcuucuguuagccacugau

SEQ ID NO: 2887 - DNA, 21 bp, Artificial sequence
  Antisense oligomer
agcuucuguuagccacugauu

SEQ ID NO: 2888 - DNA, 22 bp, Artificial sequence
  Antisense oligomer
cagcuucuguuagccacugauu

SEQ ID NO: 2889 - DNA, 22 bp, Artificial sequence
  Antisense oligomer
agcuucuguuagccacugauua

SEQ ID NO: 2890 - DNA, 23 bp, Artificial sequence
  Antisense oligomer
cagcuucuguuagccacugauua

SEQ ID NO: 2891 - DNA, 23 bp, Artificial sequence
  Antisense oligomer
agcuucuguuagccacugauuaa

SEQ ID NO: 2892 - DNA, 24 bp, Artificial sequence
  Antisense oligomer
cagcuucuguuagccacugauuaa

SEQ ID NO: 2893 - DNA, 24 bp, Artificial sequence
  Antisense oligomer
agcuucuguuagccacugauuaaa

SEQ ID NO: 2894 - DNA, 25 bp, Artificial sequence
  Antisense oligomer
cagcuucuguuagccacugauuaaa

SEQ ID NO: 2895 - DNA, 24 bp, Artificial sequence
  Antisense oligomer
agcuucuguuagccacugauuaaa

SEQ ID NO: 2896 - DNA, 20 bp, Artificial sequence
  Antisense oligomer
agcuucuguuagccacugau

SEQ ID NO: 2897 - DNA, 20 bp, Artificial sequence
  Antisense oligomer
gcuucuguuagccacugauu

SEQ ID NO: 2898 - DNA, 21 bp, Artificial sequence
  Antisense oligomer
agcuucuguuagccacugauu

SEQ ID NO: 2899 - DNA, 21 bp, Artificial sequence
  Antisense oligomer
gcuucuguuagccacugauua

SEQ ID NO: 2900 - DNA, 22 bp, Artificial sequence
  Antisense oligomer
agcuucuguuagccacugauua

SEQ ID NO: 2901 - DNA, 22 bp, Artificial sequence
  Antisense oligomer
gcuucuguuagccacugauuaa

SEQ ID NO: 2902 - DNA, 23 bp, Artificial sequence
  Antisense oligomer
agcuucuguuagccacugauuaa

SEQ ID NO: 2903 - DNA, 23 bp, Artificial sequence
  Antisense oligomer
gcuucuguuagccacugauuaaa

SEQ ID NO: 2904 - DNA, 24 bp, Artificial sequence
  Antisense oligomer
agcuucuguuagccacugauuaaa

SEQ ID NO: 2905 - DNA, 23 bp, Artificial sequence
  Antisense oligomer
gcuucuguuagccacugauuaaa

SEQ ID NO: 2906 - DNA, 23 bp, Artificial sequence
  Antisense oligomer
ccauuuguauuuagcauguuccc

SEQ ID NO: 2907 - DNA, 20 bp, Artificial sequence
  Antisense oligomer
agauaccauuuguauuuagc

SEQ ID NO: 2908 - DNA, 19 bp, Artificial sequence
  Antisense oligomer
gccauuucucaacagaucu

SEQ ID NO: 2909 - DNA, 23 bp, Artificial sequence
  Antisense oligomer
gccauuucucaacagaucuguca

SEQ ID NO: 2910 - DNA, 23 bp, Artificial sequence
  Antisense oligomer
auucucaggaauuugugucuuuc

SEQ ID NO: 2911 - DNA, 21 bp, Artificial sequence
  Antisense oligomer
ucucaggaauuugugucuuuc

SEQ ID NO: 2912 - DNA, 18 bp, Artificial sequence
  Antisense oligomer
guucagcuucuguuagcc

SEQ ID NO: 2913 - DNA, 21 bp, Artificial sequence
  Antisense oligomer
cugauuaaauaucuuuauauc

SEQ ID NO: 2914 - DNA, 18 bp, Artificial sequence
  Antisense oligomer
gccgccauuucucaacag

SEQ ID NO: 2915 - DNA, 18 bp, Artificial sequence
  Antisense oligomer
guauuuagcauguuccca

SEQ ID NO: 2916 - DNA, 18 bp, Artificial sequence
  Antisense oligomer
caggaauuugugucuuuc

SEQ ID NO: 2917 - DNA, 25 bp, Artificial sequence
  Antisense oligomer
gcuuuucuuuuaguugcugcucuuu

SEQ ID NO: 2918 - DNA, 25 bp, Artificial sequence
  Antisense oligomer
cuuuucuuuuaguugcugcucuuuu

SEQ ID NO: 2919 - DNA, 25 bp, Artificial sequence
  Antisense oligomer
uuuucuuuuaguugcugcucuuuuc

SEQ ID NO: 2920 - DNA, 25 bp, Artificial sequence
  Antisense oligomer
uuucuuuuaguugcugcucuuuucc

SEQ ID NO: 2921 - DNA, 25 bp, Artificial sequence
  Antisense oligomer
uucuuuuaguugcugcucuuuucca

SEQ ID NO: 2922 - DNA, 25 bp, Artificial sequence
  Antisense oligomer
ucuuuuaguugcugcucuuuuccag

SEQ ID NO: 2923 - DNA, 25 bp, Artificial sequence
  Antisense oligomer
cuuuuaguugcugcucuuuuccagg

SEQ ID NO: 2924 - DNA, 25 bp, Artificial sequence
  Antisense oligomer
uuuuaguugcugcucuuuuccaggu

SEQ ID NO: 2925 - DNA, 25 bp, Artificial sequence
  Antisense oligomer
uuuaguugcugcucuuuuccagguu

SEQ ID NO: 2926 - DNA, 25 bp, Artificial sequence
  Antisense oligomer
uuaguugcugcucuuuuccagguuc

SEQ ID NO: 2927 - DNA, 25 bp, Artificial sequence
  Antisense oligomer
uaguugcugcucuuuuccagguuca

SEQ ID NO: 2928 - DNA, 25 bp, Artificial sequence
  Antisense oligomer
aguugcugcucuuuuccagguucaa

SEQ ID NO: 2929 - DNA, 25 bp, Artificial sequence
  Antisense oligomer
guugcugcucuuuuccagguucaag

SEQ ID NO: 2930 - DNA, 25 bp, Artificial sequence
  Antisense oligomer
uugcugcucuuuuccagguucaagu

SEQ ID NO: 2931 - DNA, 25 bp, Artificial sequence
  Antisense oligomer
ugcugcucuuuuccagguucaagug

SEQ ID NO: 2932 - DNA, 25 bp, Artificial sequence
  Antisense oligomer
gcugcucuuuuccagguucaagugg

SEQ ID NO: 2933 - DNA, 25 bp, Artificial sequence
  Antisense oligomer
cugcucuuuuccagguucaaguggg

SEQ ID NO: 2934 - DNA, 25 bp, Artificial sequence
  Antisense oligomer
ugcucuuuuccagguucaaguggga

SEQ ID NO: 2935 - DNA, 25 bp, Artificial sequence
  Antisense oligomer
gcucuuuuccagguucaagugggac

SEQ ID NO: 2936 - DNA, 25 bp, Artificial sequence
  Antisense oligomer
cucuuuuccagguucaagugggaua

SEQ ID NO: 2937 - DNA, 25 bp, Artificial sequence
  Antisense oligomer
ucuuuuccagguucaagugggauac

SEQ ID NO: 2938 - DNA, 20 bp, Artificial sequence
  Antisense oligomer
ucuuuuccagguucaagugg

SEQ ID NO: 2939 - DNA, 25 bp, Artificial sequence
  Antisense oligomer
cuuuuccagguucaagugggauacu

SEQ ID NO: 2940 - DNA, 25 bp, Artificial sequence
  Antisense oligomer
uuuuccagguucaagugggauacua

SEQ ID NO: 2941 - DNA, 25 bp, Artificial sequence
  Antisense oligomer
uuuccagguucaagugggauacuag

SEQ ID NO: 2942 - DNA, 25 bp, Artificial sequence
  Antisense oligomer
uuccagguucaagugggauacuagc

SEQ ID NO: 2943 - DNA, 25 bp, Artificial sequence
  Antisense oligomer
uccagguucaagugggauacuagca

SEQ ID NO: 2944 - DNA, 25 bp, Artificial sequence
  Antisense oligomer
ccagguucaagugggauacuagcaa

SEQ ID NO: 2945 - DNA, 25 bp, Artificial sequence
  Antisense oligomer
cagguucaagugggauacuagcaau

SEQ ID NO: 2946 - DNA, 25 bp, Artificial sequence
  Antisense oligomer
agguucaagugggauacuagcaaug

SEQ ID NO: 2947 - DNA, 25 bp, Artificial sequence
  Antisense oligomer
gguucaagugggauacuagcaaugu

SEQ ID NO: 2948 - DNA, 25 bp, Artificial sequence
  Antisense oligomer
guucaagugggauacuagcaauguu

SEQ ID NO: 2949 - DNA, 25 bp, Artificial sequence
  Antisense oligomer
uucaagugggauacuagcaauguua

SEQ ID NO: 2950 - DNA, 25 bp, Artificial sequence
  Antisense oligomer
ucaagugggauacuagcaauguuau

SEQ ID NO: 2951 - DNA, 25 bp, Artificial sequence
  Antisense oligomer
caagugggauacuagcaauguuauc

SEQ ID NO: 2952 - DNA, 25 bp, Artificial sequence
  Antisense oligomer
aagugggauacuagcaauguuaucu

SEQ ID NO: 2953 - DNA, 25 bp, Artificial sequence
  Antisense oligomer
agugggauacuagcaauguuaucug

SEQ ID NO: 2954 - DNA, 25 bp, Artificial sequence
  Antisense oligomer
gugggauacuagcaauguuaucugc

SEQ ID NO: 2955 - DNA, 25 bp, Artificial sequence
  Antisense oligomer
ugggauacuagcaauguuaucugcu

SEQ ID NO: 2956 - DNA, 25 bp, Artificial sequence
  Antisense oligomer
gggauacuagcaauguuaucugcuu

SEQ ID NO: 2957 - DNA, 25 bp, Artificial sequence
  Antisense oligomer
ggauacuagcaauguuaucugcuuc

SEQ ID NO: 2958 - DNA, 25 bp, Artificial sequence
  Antisense oligomer
gauacuagcaauguuaucugcuucc

SEQ ID NO: 2959 - DNA, 25 bp, Artificial sequence
  Antisense oligomer
auacuagcaauguuaucugcuuccu

SEQ ID NO: 2960 - DNA, 25 bp, Artificial sequence
  Antisense oligomer
uacuagcaauguuaucugcuuccuc

SEQ ID NO: 2961 - DNA, 25 bp, Artificial sequence
  Antisense oligomer
acuagcaauguuaucugcuuccucc

SEQ ID NO: 2962 - DNA, 25 bp, Artificial sequence
  Antisense oligomer
cuagcaauguuaucugcuuccucca

SEQ ID NO: 2963 - DNA, 25 bp, Artificial sequence
  Antisense oligomer
uagcaauguuaucugcuuccuccaa

SEQ ID NO: 2964 - DNA, 25 bp, Artificial sequence
  Antisense oligomer
agcaauguuaucugcuuccuccaac

SEQ ID NO: 2965 - DNA, 25 bp, Artificial sequence
  Antisense oligomer
gcaauguuaucugcuuccuccaacc

SEQ ID NO: 2966 - DNA, 25 bp, Artificial sequence
  Antisense oligomer
caauguuaucugcuuccuccaacca

SEQ ID NO: 2967 - DNA, 25 bp, Artificial sequence
  Antisense oligomer
aauguuaucugcuuccuccaaccau

SEQ ID NO: 2968 - DNA, 25 bp, Artificial sequence
  Antisense oligomer
auguuaucugcuuccuccaaccaua

SEQ ID NO: 2969 - DNA, 25 bp, Artificial sequence
  Antisense oligomer
uguuaucugcuuccuccaaccauaa

SEQ ID NO: 2970 - DNA, 25 bp, Artificial sequence
  Antisense oligomer
agccucuugauugcuggucuuguuu

SEQ ID NO: 2971 - DNA, 25 bp, Artificial sequence
  Antisense oligomer
gccucuugauugcuggucuuguuuu

SEQ ID NO: 2972 - DNA, 25 bp, Artificial sequence
  Antisense oligomer
ccucuugauugcuggucuuguuuuu

SEQ ID NO: 2973 - DNA, 20 bp, Artificial sequence
  Antisense oligomer
ccucuugauugcuggucuug

SEQ ID NO: 2974 - DNA, 25 bp, Artificial sequence
  Antisense oligomer
cucuugauugcuggucuuguuuuuc

SEQ ID NO: 2975 - DNA, 25 bp, Artificial sequence
  Antisense oligomer
ucuugauugcuggucuuguuuuuca

SEQ ID NO: 2976 - DNA, 25 bp, Artificial sequence
  Antisense oligomer
cuugauugcuggucuuguuuuucaa

SEQ ID NO: 2977 - DNA, 25 bp, Artificial sequence
  Antisense oligomer
uugauugcuggucuuguuuuucaaa

SEQ ID NO: 2978 - DNA, 25 bp, Artificial sequence
  Antisense oligomer
ugauugcuggucuuguuuuucaaau

SEQ ID NO: 2979 - DNA, 25 bp, Artificial sequence
  Antisense oligomer
gauugcuggucuuguuuuucaaauu

SEQ ID NO: 2980 - DNA, 20 bp, Artificial sequence
  Antisense oligomer
gauugcuggucuuguuuuuc

SEQ ID NO: 2981 - DNA, 25 bp, Artificial sequence
  Antisense oligomer
auugcuggucuuguuuuucaaauuu

SEQ ID NO: 2982 - DNA, 25 bp, Artificial sequence
  Antisense oligomer
uugcuggucuuguuuuucaaauuuu

SEQ ID NO: 2983 - DNA, 25 bp, Artificial sequence
  Antisense oligomer
ugcuggucuuguuuuucaaauuuug

SEQ ID NO: 2984 - DNA, 25 bp, Artificial sequence
  Antisense oligomer
gcuggucuuguuuuucaaauuuugg

SEQ ID NO: 2985 - DNA, 25 bp, Artificial sequence
  Antisense oligomer
cuggucuuguuuuucaaauuuuggg

SEQ ID NO: 2986 - DNA, 25 bp, Artificial sequence
  Antisense oligomer
uggucuuguuuuucaaauuuugggc

SEQ ID NO: 2987 - DNA, 25 bp, Artificial sequence
  Antisense oligomer
ggucuuguuuuucaaauuuugggca

SEQ ID NO: 2988 - DNA, 25 bp, Artificial sequence
  Antisense oligomer
gucuuguuuuucaaauuuugggcag

SEQ ID NO: 2989 - DNA, 25 bp, Artificial sequence
  Antisense oligomer
ucuuguuuuucaaauuuugggcagc

SEQ ID NO: 2990 - DNA, 25 bp, Artificial sequence
  Antisense oligomer
cuuguuuuucaaauuuugggcagcg

SEQ ID NO: 2991 - DNA, 25 bp, Artificial sequence
  Antisense oligomer
uuguuuuucaaauuuugggcagcgg

SEQ ID NO: 2992 - DNA, 25 bp, Artificial sequence
  Antisense oligomer
uguuuuucaaauuuugggcagcggu

SEQ ID NO: 2993 - DNA, 25 bp, Artificial sequence
  Antisense oligomer
guuuuucaaauuuugggcagcggua

SEQ ID NO: 2994 - DNA, 25 bp, Artificial sequence
  Antisense oligomer
uuuuucaaauuuugggcagcgguaa

SEQ ID NO: 2995 - DNA, 25 bp, Artificial sequence
  Antisense oligomer
uuuucaaauuuugggcagcgguaau

SEQ ID NO: 2996 - DNA, 25 bp, Artificial sequence
  Antisense oligomer
uuucaaauuuugggcagcgguaaug

SEQ ID NO: 2997 - DNA, 25 bp, Artificial sequence
  Antisense oligomer
uucaaauuuugggcagcgguaauga

SEQ ID NO: 2998 - DNA, 25 bp, Artificial sequence
  Antisense oligomer
ucaaauuuugggcagcgguaaugag

SEQ ID NO: 2999 - DNA, 25 bp, Artificial sequence
  Antisense oligomer
caaauuuugggcagcgguaaugagu

SEQ ID NO: 3000 - DNA, 25 bp, Artificial sequence
  Antisense oligomer
aaauuuugggcagcgguaaugaguu

SEQ ID NO: 3001 - DNA, 25 bp, Artificial sequence
  Antisense oligomer
aauuuugggcagcgguaaugaguuc

SEQ ID NO: 3002 - DNA, 25 bp, Artificial sequence
  Antisense oligomer
auuuugggcagcgguaaugaguucu

SEQ ID NO: 3003 - DNA, 25 bp, Artificial sequence
  Antisense oligomer
uuuugggcagcgguaaugaguucuu

SEQ ID NO: 3004 - DNA, 25 bp, Artificial sequence
  Antisense oligomer
uuugggcagcgguaaugaguucuuc

SEQ ID NO: 3005 - DNA, 25 bp, Artificial sequence
  Antisense oligomer
uugggcagcgguaaugaguucuucc

SEQ ID NO: 3006 - DNA, 25 bp, Artificial sequence
  Antisense oligomer
ugggcagcgguaaugaguucuucca

SEQ ID NO: 3007 - DNA, 25 bp, Artificial sequence
  Antisense oligomer
gggcagcgguaaugaguucuuccaa

SEQ ID NO: 3008 - DNA, 25 bp, Artificial sequence
  Antisense oligomer
ggcagcgguaaugaguucuuccaac

SEQ ID NO: 3009 - DNA, 25 bp, Artificial sequence
  Antisense oligomer
gcagcgguaaugaguucuuccaacu

SEQ ID NO: 3010 - DNA, 25 bp, Artificial sequence
  Antisense oligomer
cagcgguaaugaguucuuccaacug

SEQ ID NO: 3011 - DNA, 25 bp, Artificial sequence
  Antisense oligomer
agcgguaaugaguucuuccaacugg

SEQ ID NO: 3012 - DNA, 25 bp, Artificial sequence
  Antisense oligomer
gcgguaaugaguucuuccaacuggg

SEQ ID NO: 3013 - DNA, 25 bp, Artificial sequence
  Antisense oligomer
cgguaaugaguucuuccaacugggg

SEQ ID NO: 3014 - DNA, 25 bp, Artificial sequence
  Antisense oligomer
gguaaugaguucuuccaacugggga

SEQ ID NO: 3015 - DNA, 22 bp, Artificial sequence
  Antisense oligomer
gguaaugaguucuuccaacugg

SEQ ID NO: 3016 - DNA, 25 bp, Artificial sequence
  Antisense oligomer
guaaugaguucuuccaacuggggac

SEQ ID NO: 3017 - DNA, 25 bp, Artificial sequence
  Antisense oligomer
uaaugaguucuuccaacuggggacg

SEQ ID NO: 3018 - DNA, 25 bp, Artificial sequence
  Antisense oligomer
aaugaguucuuccaacuggggacgc

SEQ ID NO: 3019 - DNA, 25 bp, Artificial sequence
  Antisense oligomer
augaguucuuccaacuggggacgcc

SEQ ID NO: 3020 - DNA, 25 bp, Artificial sequence
  Antisense oligomer
ugaguucuuccaacuggggacgccu

SEQ ID NO: 3021 - DNA, 25 bp, Artificial sequence
  Antisense oligomer
gaguucuuccaacuggggacgccuc

SEQ ID NO: 3022 - DNA, 25 bp, Artificial sequence
  Antisense oligomer
aguucuuccaacuggggacgccucu

SEQ ID NO: 3023 - DNA, 25 bp, Artificial sequence
  Antisense oligomer
guucuuccaacuggggacgccucug

SEQ ID NO: 3024 - DNA, 25 bp, Artificial sequence
  Antisense oligomer
uucuuccaacuggggacgccucugu

SEQ ID NO: 3025 - DNA, 25 bp, Artificial sequence
  Antisense oligomer
ucuuccaacuggggacgccucuguu

SEQ ID NO: 3026 - DNA, 25 bp, Artificial sequence
  Antisense oligomer
cuuccaacuggggacgccucuguuc

SEQ ID NO: 3027 - DNA, 25 bp, Artificial sequence
  Antisense oligomer
uuccaacuggggacgccucuguucc

SEQ ID NO: 3028 - DNA, 25 bp, Artificial sequence
  Antisense oligomer
uccaacuggggacgccucuguucca

SEQ ID NO: 3029 - DNA, 25 bp, Artificial sequence
  Antisense oligomer
ccaacuggggacgccucuguuccaa

SEQ ID NO: 3030 - DNA, 25 bp, Artificial sequence
  Antisense oligomer
caacuggggacgccucuguuccaaa

SEQ ID NO: 3031 - DNA, 25 bp, Artificial sequence
  Antisense oligomer
aacuggggacgccucuguuccaaau

SEQ ID NO: 3032 - DNA, 25 bp, Artificial sequence
  Antisense oligomer
acuggggacgccucuguuccaaauc

SEQ ID NO: 3033 - DNA, 25 bp, Artificial sequence
  Antisense oligomer
cuggggacgccucuguuccaaaucc

SEQ ID NO: 3034 - DNA, 25 bp, Artificial sequence
  Antisense oligomer
uggggacgccucuguuccaaauccu

SEQ ID NO: 3035 - DNA, 25 bp, Artificial sequence
  Antisense oligomer
ggggacgccucuguuccaaauccug

SEQ ID NO: 3036 - DNA, 25 bp, Artificial sequence
  Antisense oligomer
gggacgccucuguuccaaauccugc

SEQ ID NO: 3037 - DNA, 25 bp, Artificial sequence
  Antisense oligomer
ggacgccucuguuccaaauccugca

SEQ ID NO: 3038 - DNA, 25 bp, Artificial sequence
  Antisense oligomer
gacgccucuguuccaaauccugcau

SEQ ID NO: 3039 - DNA, 25 bp, Artificial sequence
  Antisense oligomer
ccaauaguggucaguccaggagcua

SEQ ID NO: 3040 - DNA, 25 bp, Artificial sequence
  Antisense oligomer
caauaguggucaguccaggagcuag

SEQ ID NO: 3041 - DNA, 25 bp, Artificial sequence
  Antisense oligomer
aauaguggucaguccaggagcuagg

SEQ ID NO: 3042 - DNA, 25 bp, Artificial sequence
  Antisense oligomer
auaguggucaguccaggagcuaggu

SEQ ID NO: 3043 - DNA, 21 bp, Artificial sequence
  Antisense oligomer
auaguggucaguccaggagcu

SEQ ID NO: 3044 - DNA, 25 bp, Artificial sequence
  Antisense oligomer
uaguggucaguccaggagcuagguc

SEQ ID NO: 3045 - DNA, 25 bp, Artificial sequence
  Antisense oligomer
aguggucaguccaggagcuagguca

SEQ ID NO: 3046 - DNA, 25 bp, Artificial sequence
  Antisense oligomer
guggucaguccaggagcuaggucag

SEQ ID NO: 3047 - DNA, 25 bp, Artificial sequence
  Antisense oligomer
uggucaguccaggagcuaggucagg

SEQ ID NO: 3048 - DNA, 25 bp, Artificial sequence
  Antisense oligomer
ggucaguccaggagcuaggucaggc

SEQ ID NO: 3049 - DNA, 25 bp, Artificial sequence
  Antisense oligomer
gucaguccaggagcuaggucaggcu

SEQ ID NO: 3050 - DNA, 25 bp, Artificial sequence
  Antisense oligomer
ucaguccaggagcuaggucaggcug

SEQ ID NO: 3051 - DNA, 25 bp, Artificial sequence
  Antisense oligomer
caguccaggagcuaggucaggcugc

SEQ ID NO: 3052 - DNA, 25 bp, Artificial sequence
  Antisense oligomer
aguccaggagcuaggucaggcugcu

SEQ ID NO: 3053 - DNA, 25 bp, Artificial sequence
  Antisense oligomer
guccaggagcuaggucaggcugcuu

SEQ ID NO: 3054 - DNA, 25 bp, Artificial sequence
  Antisense oligomer
uccaggagcuaggucaggcugcuuu

SEQ ID NO: 3055 - DNA, 25 bp, Artificial sequence
  Antisense oligomer
ccaggagcuaggucaggcugcuuug

SEQ ID NO: 3056 - DNA, 25 bp, Artificial sequence
  Antisense oligomer
caggagcuaggucaggcugcuuugc

SEQ ID NO: 3057 - DNA, 25 bp, Artificial sequence
  Antisense oligomer
aggagcuaggucaggcugcuuugcc

SEQ ID NO: 3058 - DNA, 25 bp, Artificial sequence
  Antisense oligomer
ggagcuaggucaggcugcuuugccc

SEQ ID NO: 3059 - DNA, 25 bp, Artificial sequence
  Antisense oligomer
gagcuaggucaggcugcuuugcccu

SEQ ID NO: 3060 - DNA, 25 bp, Artificial sequence
  Antisense oligomer
agcuaggucaggcugcuuugcccuc

SEQ ID NO: 3061 - DNA, 25 bp, Artificial sequence
  Antisense oligomer
gcuaggucaggcugcuuugcccuca

SEQ ID NO: 3062 - DNA, 25 bp, Artificial sequence
  Antisense oligomer
cucagcucuugaaguaaacgguuua

SEQ ID NO: 3063 - DNA, 25 bp, Artificial sequence
  Antisense oligomer
cagcucuugaaguaaacgguuuacc

SEQ ID NO: 3064 - DNA, 25 bp, Artificial sequence
  Antisense oligomer
gcucuugaaguaaacgguuuaccgc

SEQ ID NO: 3065 - DNA, 25 bp, Artificial sequence
  Antisense oligomer
cuaggucaggcugcuuugcccucag

SEQ ID NO: 3066 - DNA, 25 bp, Artificial sequence
  Antisense oligomer
uaggucaggcugcuuugcccucagc

SEQ ID NO: 3067 - DNA, 25 bp, Artificial sequence
  Antisense oligomer
aggucaggcugcuuugcccucagcu

SEQ ID NO: 3068 - DNA, 25 bp, Artificial sequence
  Antisense oligomer
ggucaggcugcuuugcccucagcuc

SEQ ID NO: 3069 - DNA, 25 bp, Artificial sequence
  Antisense oligomer
gucaggcugcuuugcccucagcucu

SEQ ID NO: 3070 - DNA, 25 bp, Artificial sequence
  Antisense oligomer
ucaggcugcuuugcccucagcucuu

SEQ ID NO: 3071 - DNA, 25 bp, Artificial sequence
  Antisense oligomer
caggcugcuuugcccucagcucuug

SEQ ID NO: 3072 - DNA, 25 bp, Artificial sequence
  Antisense oligomer
aggcugcuuugcccucagcucuuga

SEQ ID NO: 3073 - DNA, 25 bp, Artificial sequence
  Antisense oligomer
ggcugcuuugcccucagcucuugaa

SEQ ID NO: 3074 - DNA, 25 bp, Artificial sequence
  Antisense oligomer
gcugcuuugcccucagcucuugaag

SEQ ID NO: 3075 - DNA, 25 bp, Artificial sequence
  Antisense oligomer
cugcuuugcccucagcucuugaagu

SEQ ID NO: 3076 - DNA, 25 bp, Artificial sequence
  Antisense oligomer
ugcuuugcccucagcucuugaagua

SEQ ID NO: 3077 - DNA, 25 bp, Artificial sequence
  Antisense oligomer
gcuuugcccucagcucuugaaguaa

SEQ ID NO: 3078 - DNA, 25 bp, Artificial sequence
  Antisense oligomer
cuuugcccucagcucuugaaguaaa

SEQ ID NO: 3079 - DNA, 25 bp, Artificial sequence
  Antisense oligomer
uuugcccucagcucuugaaguaaac

SEQ ID NO: 3080 - DNA, 25 bp, Artificial sequence
  Antisense oligomer
uugcccucagcucuugaaguaaacg

SEQ ID NO: 3081 - DNA, 25 bp, Artificial sequence
  Antisense oligomer
ugcccucagcucuugaaguaaacgg

SEQ ID NO: 3082 - DNA, 25 bp, Artificial sequence
  Antisense oligomer
gcccucagcucuugaaguaaacggu

SEQ ID NO: 3083 - DNA, 25 bp, Artificial sequence
  Antisense oligomer
cccucagcucuugaaguaaacgguu

SEQ ID NO: 3084 - DNA, 20 bp, Artificial sequence
  Antisense oligomer
ccucagcucuugaaguaaac

SEQ ID NO: 3085 - DNA, 21 bp, Artificial sequence
  Antisense oligomer
ccucagcucuugaaguaaacg

SEQ ID NO: 3086 - DNA, 20 bp, Artificial sequence
  Antisense oligomer
cucagcucuugaaguaaacg

SEQ ID NO: 3087 - DNA, 25 bp, Artificial sequence
  Antisense oligomer
ccucagcucuugaaguaaacgguuu

SEQ ID NO: 3088 - DNA, 25 bp, Artificial sequence
  Antisense oligomer
ucagcucuugaaguaaacgguuuac

SEQ ID NO: 3089 - DNA, 25 bp, Artificial sequence
  Antisense oligomer
agcucuugaaguaaacgguuuaccg

SEQ ID NO: 3090 - DNA, 25 bp, Artificial sequence
  Antisense oligomer
cucuugaaguaaacgguuuaccgcc

SEQ ID NO: 3091 - DNA, 25 bp, Artificial sequence
  Antisense oligomer
ccacaggcguugcacuuugcaaugc

SEQ ID NO: 3092 - DNA, 25 bp, Artificial sequence
  Antisense oligomer
cacaggcguugcacuuugcaaugcu

SEQ ID NO: 3093 - DNA, 25 bp, Artificial sequence
  Antisense oligomer
acaggcguugcacuuugcaaugcug

SEQ ID NO: 3094 - DNA, 25 bp, Artificial sequence
  Antisense oligomer
caggcguugcacuuugcaaugcugc

SEQ ID NO: 3095 - DNA, 25 bp, Artificial sequence
  Antisense oligomer
aggcguugcacuuugcaaugcugcu

SEQ ID NO: 3096 - DNA, 25 bp, Artificial sequence
  Antisense oligomer
ggcguugcacuuugcaaugcugcug

SEQ ID NO: 3097 - DNA, 25 bp, Artificial sequence
  Antisense oligomer
gcguugcacuuugcaaugcugcugu

SEQ ID NO: 3098 - DNA, 25 bp, Artificial sequence
  Antisense oligomer
cguugcacuuugcaaugcugcuguc

SEQ ID NO: 3099 - DNA, 23 bp, Artificial sequence
  Antisense oligomer
cguugcacuuugcaaugcugcug

SEQ ID NO: 3100 - DNA, 25 bp, Artificial sequence
  Antisense oligomer
guugcacuuugcaaugcugcugucu

SEQ ID NO: 3101 - DNA, 25 bp, Artificial sequence
  Antisense oligomer
uugcacuuugcaaugcugcugucuu

SEQ ID NO: 3102 - DNA, 25 bp, Artificial sequence
  Antisense oligomer
ugcacuuugcaaugcugcugucuuc

SEQ ID NO: 3103 - DNA, 25 bp, Artificial sequence
  Antisense oligomer
gcacuuugcaaugcugcugucuucu

SEQ ID NO: 3104 - DNA, 25 bp, Artificial sequence
  Antisense oligomer
cacuuugcaaugcugcugucuucuu

SEQ ID NO: 3105 - DNA, 25 bp, Artificial sequence
  Antisense oligomer
acuuugcaaugcugcugucuucuug

SEQ ID NO: 3106 - DNA, 25 bp, Artificial sequence
  Antisense oligomer
cuuugcaaugcugcugucuucuugc

SEQ ID NO: 3107 - DNA, 25 bp, Artificial sequence
  Antisense oligomer
uuugcaaugcugcugucuucuugcu

SEQ ID NO: 3108 - DNA, 25 bp, Artificial sequence
  Antisense oligomer
uugcaaugcugcugucuucuugcua

SEQ ID NO: 3109 - DNA, 25 bp, Artificial sequence
  Antisense oligomer
ugcaaugcugcugucuucuugcuau

SEQ ID NO: 3110 - DNA, 25 bp, Artificial sequence
  Antisense oligomer
gcaaugcugcugucuucuugcuaug

SEQ ID NO: 3111 - DNA, 25 bp, Artificial sequence
  Antisense oligomer
caaugcugcugucuucuugcuauga

SEQ ID NO: 3112 - DNA, 25 bp, Artificial sequence
  Antisense oligomer
aaugcugcugucuucuugcuaugaa

SEQ ID NO: 3113 - DNA, 25 bp, Artificial sequence
  Antisense oligomer
augcugcugucuucuugcuaugaau

SEQ ID NO: 3114 - DNA, 25 bp, Artificial sequence
  Antisense oligomer
ugcugcugucuucuugcuaugaaua

SEQ ID NO: 3115 - DNA, 25 bp, Artificial sequence
  Antisense oligomer
gcugcugucuucuugcuaugaauaa

SEQ ID NO: 3116 - DNA, 25 bp, Artificial sequence
  Antisense oligomer
cugcugucuucuugcuaugaauaau

SEQ ID NO: 3117 - DNA, 25 bp, Artificial sequence
  Antisense oligomer
ugcugucuucuugcuaugaauaaug

SEQ ID NO: 3118 - DNA, 25 bp, Artificial sequence
  Antisense oligomer
gcugucuucuugcuaugaauaaugu

SEQ ID NO: 3119 - DNA, 25 bp, Artificial sequence
  Antisense oligomer
cugucuucuugcuaugaauaauguc

SEQ ID NO: 3120 - DNA, 25 bp, Artificial sequence
  Antisense oligomer
ugucuucuugcuaugaauaauguca

SEQ ID NO: 3121 - DNA, 25 bp, Artificial sequence
  Antisense oligomer
gucuucuugcuaugaauaaugucaa

SEQ ID NO: 3122 - DNA, 25 bp, Artificial sequence
  Antisense oligomer
ucuucuugcuaugaauaaugucaau

SEQ ID NO: 3123 - DNA, 25 bp, Artificial sequence
  Antisense oligomer
cuucuugcuaugaauaaugucaauc

SEQ ID NO: 3124 - DNA, 25 bp, Artificial sequence
  Antisense oligomer
uucuugcuaugaauaaugucaaucc

SEQ ID NO: 3125 - DNA, 25 bp, Artificial sequence
  Antisense oligomer
ucuugcuaugaauaaugucaauccg

SEQ ID NO: 3126 - DNA, 25 bp, Artificial sequence
  Antisense oligomer
cuugcuaugaauaaugucaauccga

SEQ ID NO: 3127 - DNA, 25 bp, Artificial sequence
  Antisense oligomer
uugcuaugaauaaugucaauccgac

SEQ ID NO: 3128 - DNA, 25 bp, Artificial sequence
  Antisense oligomer
ugcuaugaauaaugucaauccgacc

SEQ ID NO: 3129 - DNA, 25 bp, Artificial sequence
  Antisense oligomer
gcuaugaauaaugucaauccgaccu

SEQ ID NO: 3130 - DNA, 25 bp, Artificial sequence
  Antisense oligomer
cuaugaauaaugucaauccgaccug

SEQ ID NO: 3131 - DNA, 25 bp, Artificial sequence
  Antisense oligomer
uaugaauaaugucaauccgaccuga

SEQ ID NO: 3132 - DNA, 25 bp, Artificial sequence
  Antisense oligomer
augaauaaugucaauccgaccugag

SEQ ID NO: 3133 - DNA, 25 bp, Artificial sequence
  Antisense oligomer
ugaauaaugucaauccgaccugagc

SEQ ID NO: 3134 - DNA, 25 bp, Artificial sequence
  Antisense oligomer
gaauaaugucaauccgaccugagcu

SEQ ID NO: 3135 - DNA, 25 bp, Artificial sequence
  Antisense oligomer
aauaaugucaauccgaccugagcuu

SEQ ID NO: 3136 - DNA, 25 bp, Artificial sequence
  Antisense oligomer
auaaugucaauccgaccugagcuuu

SEQ ID NO: 3137 - DNA, 25 bp, Artificial sequence
  Antisense oligomer
uaaugucaauccgaccugagcuuug

SEQ ID NO: 3138 - DNA, 25 bp, Artificial sequence
  Antisense oligomer
aaugucaauccgaccugagcuuugu

SEQ ID NO: 3139 - DNA, 25 bp, Artificial sequence
  Antisense oligomer
augucaauccgaccugagcuuuguu

SEQ ID NO: 3140 - DNA, 25 bp, Artificial sequence
  Antisense oligomer
ugucaauccgaccugagcuuuguug

SEQ ID NO: 3141 - DNA, 25 bp, Artificial sequence
  Antisense oligomer
gucaauccgaccugagcuuuguugu

SEQ ID NO: 3142 - DNA, 25 bp, Artificial sequence
  Antisense oligomer
ucaauccgaccugagcuuuguugua

SEQ ID NO: 3143 - DNA, 25 bp, Artificial sequence
  Antisense oligomer
caauccgaccugagcuuuguuguag

SEQ ID NO: 3144 - DNA, 25 bp, Artificial sequence
  Antisense oligomer
aauccgaccugagcuuuguuguaga

SEQ ID NO: 3145 - DNA, 25 bp, Artificial sequence
  Antisense oligomer
auccgaccugagcuuuguuguagac

SEQ ID NO: 3146 - DNA, 25 bp, Artificial sequence
  Antisense oligomer
uccgaccugagcuuuguuguagacu

SEQ ID NO: 3147 - DNA, 25 bp, Artificial sequence
  Antisense oligomer
ccgaccugagcuuuguuguagacua

SEQ ID NO: 3148 - DNA, 20 bp, Artificial sequence
  Antisense oligomer
cgaccugagcuuuguuguag

SEQ ID NO: 3149 - DNA, 25 bp, Artificial sequence
  Antisense oligomer
cgaccugagcuuuguuguagacuau

SEQ ID NO: 3150 - DNA, 25 bp, Artificial sequence
  Antisense oligomer
gaccugagcuuuguuguagacuauc

SEQ ID NO: 3151 - DNA, 25 bp, Artificial sequence
  Antisense oligomer
accugagcuuuguuguagacuauca

SEQ ID NO: 3152 - DNA, 23 bp, Artificial sequence
  Antisense oligomer
ccugagcuuuguuguagacuauc

SEQ ID NO: 3153 - DNA, 20 bp, Artificial sequence
  Antisense oligomer
cauuuuugaccuacaugugg

SEQ ID NO: 3154 - DNA, 20 bp, Artificial sequence
  Antisense oligomer
uuugaccuacauguggaaag

SEQ ID NO: 3155 - DNA, 26 bp, Artificial sequence
  Antisense oligomer
uacauuuuugaccuacauguggaaag

SEQ ID NO: 3156 - DNA, 17 bp, Artificial sequence
  Antisense oligomer
ggucuccuuaccuauga

SEQ ID NO: 3157 - DNA, 24 bp, Artificial sequence
  Antisense oligomer
ucuuaccuaugacuauggaugaga

SEQ ID NO: 3158 - DNA, 22 bp, Artificial sequence
  Antisense oligomer
auuuuugaccuacaugggaaag

SEQ ID NO: 3159 - DNA, 23 bp, Artificial sequence
  Antisense oligomer
uacgaguugauugucggacccag

SEQ ID NO: 3160 - DNA, 25 bp, Artificial sequence
  Antisense oligomer
guggucuccuuaccuaugacugugg

SEQ ID NO: 3161 - DNA, 24 bp, Artificial sequence
  Antisense oligomer
ugucucaguaaucuucuuaccuau

SEQ ID NO: 3162 - DNA, 23 bp, Artificial sequence
  Antisense oligomer
ugcauguuccagucguugugugg

SEQ ID NO: 3163 - DNA, 25 bp, Artificial sequence
  Antisense oligomer
cacuauuccagucaaauaggucugg

SEQ ID NO: 3164 - DNA, 25 bp, Artificial sequence
  Antisense oligomer
auuuaccaaccuucaggaucgagua

SEQ ID NO: 3165 - DNA, 21 bp, Artificial sequence
  Antisense oligomer
ggccuaaaacacauacacaua

SEQ ID NO: 3166 - DNA, 24 bp, Artificial sequence
  Antisense oligomer
gauaggugguaucaacaucuguaa

SEQ ID NO: 3167 - DNA, 21 bp, Artificial sequence
  Antisense oligomer
gauaggugguaucaacaucug

SEQ ID NO: 3168 - DNA, 19 bp, Artificial sequence
  Antisense oligomer
cuuccuggauggcuugaau

SEQ ID NO: 3169 - DNA, 20 bp, Artificial sequence
  Antisense oligomer
uguuguuguuuaugcucauu

SEQ ID NO: 3170 - DNA, 19 bp, Artificial sequence
  Antisense oligomer
guacauuaagauggacuuc

SEQ ID NO: 3171 - DNA, 20 bp, Artificial sequence
  Antisense oligomer
cuguugcaguaaucuaugag

SEQ ID NO: 3172 - DNA, 20 bp, Artificial sequence
  Antisense oligomer
ugcaguaaucuaugaguuuc

SEQ ID NO: 3173 - DNA, 18 bp, Artificial sequence
  Antisense oligomer
gagucuucuaggagccuu

SEQ ID NO: 3174 - DNA, 23 bp, Artificial sequence
  Antisense oligomer
ugccauuguuucaucagcucuuu

SEQ ID NO: 3175 - DNA, 20 bp, Artificial sequence
  Antisense oligomer
uccuguaggacauuggcagu

SEQ ID NO: 3176 - DNA, 20 bp, Artificial sequence
  Antisense oligomer
cuuggagucuucuaggagcc

SEQ ID NO: 3177 - DNA, 30 bp, Artificial sequence
  Antisense oligomer
ccauuuugugaauguuuucuuuugaacauc

SEQ ID NO: 3178 - DNA, 24 bp, Artificial sequence
  Antisense oligomer
cccauuuugugaauguuuucuuuu

SEQ ID NO: 3179 - DNA, 24 bp, Artificial sequence
  Antisense oligomer
gaaaauugugcauuuacccauuuu

SEQ ID NO: 3180 - DNA, 22 bp, Artificial sequence
  Antisense oligomer
uugugcauuuacccauuuugug

SEQ ID NO: 3181 - DNA, 24 bp, Artificial sequence
  Antisense oligomer
cccugaggcauucccaucuugaau

SEQ ID NO: 3182 - DNA, 20 bp, Artificial sequence
  Antisense oligomer
aggacuuacuugcuuuguuu

SEQ ID NO: 3183 - DNA, 23 bp, Artificial sequence
  Antisense oligomer
cuugaauuuaggagauucaucug

SEQ ID NO: 3184 - DNA, 23 bp, Artificial sequence
  Antisense oligomer
caucuucugauaauuuuccuguu

SEQ ID NO: 3185 - DNA, 20 bp, Artificial sequence
  Antisense oligomer
ccauuacaguugucuguguu

SEQ ID NO: 3186 - DNA, 23 bp, Artificial sequence
  Antisense oligomer
ugacagccugugaaaucugugag

SEQ ID NO: 3187 - DNA, 20 bp, Artificial sequence
  Antisense oligomer
uaaucugccucuucuuuugg

SEQ ID NO: 3188 - DNA, 20 bp, Artificial sequence
  Antisense oligomer
cagcaguaguugucaucugc

SEQ ID NO: 3189 - DNA, 27 bp, Artificial sequence
  Antisense oligomer
gccugagcugaucugcuggcaucuugc

SEQ ID NO: 3190 - DNA, 31 bp, Artificial sequence; identical to SEQ ID NO: 165
  Antisense oligomer

SEQ ID NO: 3191 - DNA, 16 bp, Artificial sequence
  Antisense oligomer
ucugcuggcaucuugc

SEQ ID NO: 3192 - DNA, 22 bp, Artificial sequence
  Antisense oligomer
gccgguugacuucauccugugc

SEQ ID NO: 3193 - DNA, 23 bp, Artificial sequence
  Antisense oligomer
gucugcauccaggaacauggguc

SEQ ID NO: 3194 - DNA, 24 bp, Artificial sequence
  Antisense oligomer
uacuuacugucuguagcucuuucu

SEQ ID NO: 3195 - DNA, 22 bp, Artificial sequence
  Antisense oligomer
cugcauccaggaacaugggucc

SEQ ID NO: 3196 - DNA, 24 bp, Artificial sequence
  Antisense oligomer
guugaagaucugauagccgguuga

SEQ ID NO: 3197 - DNA, 17 bp, Artificial sequence
  Antisense oligomer
uaggugccugccggcuu

SEQ ID NO: 3198 - DNA, 18 bp, Artificial sequence
  Antisense oligomer
uucagcuguagccacacc

SEQ ID NO: 3199 - DNA, 21 bp, Artificial sequence
  Antisense oligomer
cugaacugcuggaaagucgcc

SEQ ID NO: 3200 - DNA, 30 bp, Artificial sequence; identical to SEQ ID NO: 2656
  Antisense oligomer

SEQ ID NO: 3201 - DNA, 21 bp, Artificial sequence
  Antisense oligomer
caauuuuucccacucaguauu

SEQ ID NO: 3202 - DNA, 19 bp, Artificial sequence
  Antisense oligomer
uugaaguuccuggagucuu

SEQ ID NO: 3203 - DNA, 22 bp, Artificial sequence
  Antisense oligomer
uccucaggaggcagcucuaaau

SEQ ID NO: 3204 - DNA, 16 bp, Artificial sequence
  Antisense oligomer
uggcucucucccaggg

SEQ ID NO: 3205 - DNA, 27 bp, Artificial sequence
  Antisense oligomer
gagauggcucucucccagggacccugg

SEQ ID NO: 3206 - DNA, 17 bp, Artificial sequence
  Antisense oligomer
gggcacuuuguuuggcg

SEQ ID NO: 3207 - DNA, 19 bp, Artificial sequence
  Antisense oligomer
ggucccagcaaguuguuug

SEQ ID NO: 3208 - DNA, 25 bp, Artificial sequence
  Antisense oligomer
ugggauggucccagcaaguuguuug

SEQ ID NO: 3209 - DNA, 21 bp, Artificial sequence
  Antisense oligomer
guagagcucugucauuuuggg

SEQ ID NO: 3210 - DNA, 25 bp, Artificial sequence
  Antisense oligomer
gcucaagagauccacugcaaaaaac

SEQ ID NO: 3211 - DNA, 26 bp, Artificial sequence
  Antisense oligomer
gccauacguacguaucauaaacauuc

SEQ ID NO: 3212 - DNA, 25 bp, Artificial sequence
  Antisense oligomer
ucugcaggauauccaugggcugguc

SEQ ID NO: 3213 - DNA, 27 bp, Artificial sequence
  Antisense oligomer
gauccucccuguucguccccuauuaug

SEQ ID NO: 3214 - DNA, 24 bp, Artificial sequence
  Antisense oligomer
ugcuuuagacuccuguaccugaua

SEQ ID NO: 3215 - DNA, 18 bp, Artificial sequence
  Antisense oligomer
ggcggccuuuguguugac

SEQ ID NO: 3216 - DNA, 25 bp, Artificial sequence
  Antisense oligomer
ggacaggccuuuauguucgugcugc

SEQ ID NO: 3217 - DNA, 19 bp, Artificial sequence
  Antisense oligomer
ccuuuauguucgugcugcu

SEQ ID NO: 3218 - DNA, 20 bp, Artificial sequence
  Antisense oligomer
ucaaggaagauggcauuucu

SEQ ID NO: 3219 - DNA, 20 bp, Artificial sequence
  Antisense oligomer
  misc_feature (1)..(20): each n is independently u or t
ucaangaagauggcauuucu

SEQ ID NO: 3220 - DNA, 20 bp, Artificial sequence
  Antisense oligomer
  misc_feature (1)  (20): each n is independently u or t
ucaagnaagauggcauuucu

SEQ ID NO: 3221 - DNA, 20 bp, Artificial sequence
  Antisense oligomer
  misc_feature (1)  (20): each n is independently u or t
ucaaggaanauggcauuucu

SEQ ID NO: 3222 - DNA, 20 bp, Artificial sequence
  Antisense oligomer
  misc_feature (1)  (20): each n is independently u or t
ucaaggaagaungcauuucu

SEQ ID NO: 3223 - DNA, 20 bp, Artificial sequence
  Antisense oligomer
  misc_feature (1)  (20): each n is independently u or t
ucaaggaagaugncauuucu

SEQ ID NO: 3224 - DNA, 20 bp, Artificial sequence
  Antisense oligomer
  misc_feature (1)  (20): each n is independently u or t
ncaaggaagauggcauuucu

SEQ ID NO: 3225 - DNA, 20 bp, Artificial sequence
  Antisense oligomer
  misc_feature (1)  (20): each n is independently u or t
ucaaggaaganggcauuucu

SEQ ID NO: 3226 - DNA, 20 bp, Artificial sequence
  Antisense oligomer
  misc_feature (1)  (20): each n is independently u or t
ucaaggaagauggcanuucu

SEQ ID NO: 3227 - DNA, 20 bp, Artificial sequence
  Antisense oligomer
  misc_feature (1)  (20): each n is independently u or t
ucaaggaagauggcaunucu

SEQ ID NO: 3228 - DNA, 20 bp, Artificial sequence
  Antisense oligomer
  misc_feature (1)  (20): each n is independently u or t
ucaaggaagauggcauuncu

SEQ ID NO: 3229 - DNA, 20 bp, Artificial sequence
  Antisense oligomer
  misc_feature (1)  (20): each n is independently u or t
ucaaggaagauggcauuucn

SEQ ID NO: 3230 - DNA, 20 bp, Artificial sequence
  Antisense oligomer
  misc_feature (1)  (20): each n is independently u or t
ucnaggaagauggcauuucu

SEQ ID NO: 3231 - DNA, 20 bp, Artificial sequence
  Antisense oligomer
  misc_feature (1)  (20): each n is independently u or t
ucanggaagauggcauuucu

SEQ ID NO: 3232 - DNA, 20 bp, Artificial sequence
  Antisense oligomer
  misc_feature (1)  (20): each n is independently u or t
ucaaggnagauggcauuucu

SEQ ID NO: 3233 - DNA, 20 bp, Artificial sequence
  Antisense oligomer
  misc_feature (1)  (20): each n is independently u or t
ucaaggangauggcauuucu

SEQ ID NO: 3234 - DNA, 20 bp, Artificial sequence
  Antisense oligomer
  misc_feature (1)  (20): each n is independently u or t
ucaaggaagnuggcauuucu

SEQ ID NO: 3235 - DNA, 20 bp, Artificial sequence
  Antisense oligomer
  misc_feature (1)  (20): each n is independently u or t
ucaaggaagauggcnuuucu

SEQ ID NO: 3236 - DNA, 25 bp, Artificial sequence
  Antisense oligomer
  misc_feature (1)  (25): each n is independently u or t
uuugccncugcccaaugccauccug

SEQ ID NO: 3237 - DNA, 25 bp, Artificial sequence
  Antisense oligomer
  misc_feature (1)  (25): each n is independently u or t
uuugccgcuncccaaugccauccug

SEQ ID NO: 3238 - DNA, 25 bp, Artificial sequence
  Antisense oligomer
  misc_feature (1)  (25): each n is independently u or t
uuugccgcugcccaaunccauccug

SEQ ID NO: 3239 - DNA, 25 bp, Artificial sequence
  Antisense oligomer
  misc_feature (1)  (25): each n is independently u or t
uuunccgcugcccaaugccauccug

SEQ ID NO: 3240 - DNA, 25 bp, Artificial sequence
  Antisense oligomer
  misc_feature (1)  (25): each n is independently u or t
uuugccgcugcccaaugccauccun

SEQ ID NO: 3241 - DNA, 25 bp, Artificial sequence
  Antisense oligomer
  misc_feature (1)  (25): each n is independently u or t
nuugccgcugcccaaugccauccug

SEQ ID NO: 3242 - DNA, 25 bp, Artificial sequence
  Antisense oligomer
  misc_feature (1)  (25): each n is independently u or t
unugccgcugcccaaugccauccug

SEQ ID NO: 3243 - DNA, 25 bp, Artificial sequence
  Antisense oligomer
  misc_feature (1)  (25): each n is independently u or t
uungccgcugcccaaugccauccug

SEQ ID NO: 3244 - DNA, 25 bp, Artificial sequence
  Antisense oligomer
  misc_feature (1)  (25): each n is independently u or t
uuugccgcngcccaaugccauccug

SEQ ID NO: 3245 - DNA, 25 bp, Artificial sequence
  Antisense oligomer
  misc_feature (1)  (25): each n is independently u or t
uuugccgcugcccanugccauccug

SEQ ID NO: 3246 - DNA, 25 bp, Artificial sequence
  Antisense oligomer
  misc_feature (1)  (25): each n is independently u or t
uuugccgcugcccaaugccnuccug

SEQ ID NO: 3247 - DNA, 25 bp, Artificial sequence
  Antisense oligomer
  misc_feature (1)  (25): each n is independently u or t
uuunccncugcccaaugccauccug

SEQ ID NO: 3248 - DNA, 25 bp, Artificial sequence
  Antisense oligomer
  misc_feature (1)  (25): each n is independently u or t
uuugccgcugcccaangccauccug

SEQ ID NO: 3249 - DNA, 25 bp, Artificial sequence
  Antisense oligomer
  misc_feature (1)  (25): each n is independently u or t
uuugccgcugcccaaugccanccug

SEQ ID NO: 3250 - DNA, 25 bp, Artificial sequence
  Antisense oligomer
  misc_feature (1)  (25): each n is independently u or t
uuugccgcugcccaaugccauccng

SEQ ID NO: 3251 - DNA, 25 bp, Artificial sequence
  Antisense oligomer
  misc_feature (1)  (25): each n is independently u or t
uuugccgcugcccnaugccauccug

SEQ ID NO: 3252 - DNA, 20 bp, Artificial sequence
  Antisense oligomer
  misc_feature (1)  (20): each n is independently u or t
ucagcuucunuuagccacug

SEQ ID NO: 3253 - DNA, 20 bp, Artificial sequence
  Antisense oligomer
  misc_feature (1)  (20): each n is independently u or t
ucagcuucuguuanccacug

SEQ ID NO: 3254 - DNA, 20 bp, Artificial sequence
  Antisense oligomer
  misc_feature (1)  (20): each n is independently u or t
ucancuucuguuagccacug

SEQ ID NO: 3255 - DNA, 20 bp, Artificial sequence
  Antisense oligomer
  misc_feature (1)  (20): each n is independently u or t
ucagcuucuguuagccacun

SEQ ID NO: 3256 - DNA, 19 bp, Artificial sequence
  Antisense oligomer
  misc_feature (1)  (19): each n is independently u or t
gnnnnnnnnnnnnngnnnn

SEQ ID NO: 3257 - DNA, 20 bp, Artificial sequence
  Antisense oligomer
  misc_feature (1)  (20): each n is independently u or t
nnngnnnnngnnngnnnnng

SEQ ID NO: 3258 - DNA, 20 bp, Artificial sequence
  Antisense oligomer
  misc_feature (1)  (20): each n is independently u or t
nnngnnnnnngnnngnnnnn

SEQ ID NO: 3259 - DNA, 23 bp, Artificial sequence
  Antisense oligomer
  misc_feature (1)  (23): each n is independently u or t
nnnnnnnggnnnnngngnnnnnn

SEQ ID NO: 3260 - DNA, 23 bp, Artificial sequence
  Antisense oligomer
  misc_feature (1)  (23): each n is independently u or t
nnnnnngnnnnnngnnngnnnnn

SEQ ID NO: 3261 - DNA, 21 bp, Artificial sequence
  Antisense oligomer
  misc_feature (1)  (21): each n is independently u or t
nnnnnggnnnnngngnnnnnn

SEQ ID NO: 3262 - DNA, 23 bp, Artificial sequence
  Antisense oligomer
  misc_feature (1)  (23): each n is independently u or t
gnnnnnnnnnnnnngnnnngnnn

SEQ ID NO: 3263 - DNA, 25 bp, Artificial sequence
  Antisense oligomer
  misc_feature (1)  (25): each n is independently u or t
nnngnngnngnnnnnngnnnnnnng

SEQ ID NO: 3264 - DNA, 24 bp, Artificial sequence
  Antisense oligomer
  misc_feature (1)  (24): each n is independently u or t
nngnngnngnnnnnngnnnnnnng

SEQ ID NO: 3265 - DNA, 25 bp, Artificial sequence
  Antisense oligomer
  misc_feature (1)  (25): each n is independently u or t
nngnngnngnnnnnngnnnnnnngg

SEQ ID NO: 3266 - DNA, 23 bp, Artificial sequence
  Antisense oligomer
  misc_feature (1)  (23): each n is independently u or t
ngnngnngnnnnnngnnnnnnng

SEQ ID NO: 3267 - DNA, 24 bp, Artificial sequence
  Antisense oligomer
  misc_feature (1)  (24): each n is independently u or t
ngnngnngnnnnnngnnnnnnngg

SEQ ID NO: 3268 - DNA, 22 bp, Artificial sequence
  Antisense oligomer
  misc_feature (1)  (22): each n is independently u or t
gnngnngnnnnnngnnnnnnng

SEQ ID NO: 3269 - DNA, 22 bp, Artificial sequence
  Antisense oligomer
  misc_feature (1)  (22): each n is independently u or t
nngnngnnnnnngnnnnnnngg

SEQ ID NO: 3270 - DNA, 25 bp, Artificial sequence
  Antisense oligomer
  misc_feature (1)  (25): each n is independently u or t
nnngnnnnngnnnnnngnnnnnnng

SEQ ID NO: 3271 - DNA, 25 bp, Artificial sequence
  Antisense oligomer
  misc_feature (1)  (25): each n is independently u or t
nngnnngnngnngnnnnnngnnnnn

SEQ ID NO: 3272 - DNA, 30 bp, Artificial sequence
  Antisense oligomer
  misc_feature (1)  (30): each n is independently u or t
nngnnngnngnngnnnnnngnnnnnnnggn

SEQ ID NO: 3273 - DNA, 20 bp, Artificial sequence
  Antisense oligomer
  misc_feature (1)  (20): each n is independently u or t
nnnnggnngnnggnnnnnnn

SEQ ID NO: 3274 - DNA, 17 bp, Artificial sequence
  Antisense oligomer
  misc_feature (1)  (17): each n is independently u or t
nggnnnnnnnngnnngg

SEQ ID NO: 3275 - DNA, 22 bp, Artificial sequence
  Antisense oligomer
  misc_feature (1)  (22): each n is independently u or t
nnnnnnggnngnnggnnnnnnn

SEQ ID NO: 3276 - DNA, 25 bp, Artificial sequence
  Antisense oligomer
  misc_feature (1)  (25): each n is independently u or t
nnnnnnnnnggnngnnggnnnnnnn

SEQ ID NO: 3277 - DNA, 23 bp, Artificial sequence
  Antisense oligomer
  misc_feature (1)  (23): each n is independently u or t
nnnnngngnnnnnnnnnnnngnn

SEQ ID NO: 3278 - DNA, 23 bp, Artificial sequence
  Antisense oligomer
  misc_feature (1)  (23): each n is independently u or t
nnngngnnggnnnnnnnnnnnnn

SEQ ID NO: 3279 - DNA, 30 bp, Artificial sequence
  Antisense oligomer
  misc_feature (1)  (30): each n is independently u or t
nnnnnnnggnngnnggnnnnnnnngnnngg

SEQ ID NO: 3280 - DNA, 25 bp, Artificial sequence
  Antisense oligomer
  misc_feature (1)  (25): each n is independently u or t
nnnnnnnggnngnnggnnnnnnnng

SEQ ID NO: 3281 - DNA, 25 bp, Artificial sequence
  Antisense oligomer
  misc_feature (1)  (25): each n is independently u or t
nnnnngnnngnnggnnnngnnnnnn

SEQ ID NO: 3282 - DNA, 22 bp, Artificial sequence
  Antisense oligomer
  misc_feature (1)  (22): each n is independently u or t
ggnnnngngnnnnnnnnnnngg

SEQ ID NO: 3283 - DNA, 25 bp, Artificial sequence
  Antisense oligomer
  misc_feature (1)  (25): each n is independently u or t
nnnngnnngnnggnnnngnnnnnnn

SEQ ID NO: 3284 - DNA, 25 bp, Artificial sequence
  Antisense oligomer
  misc_feature (1)  (25): each n is independently u or t
nnnnnnnnggggnngnnnnngnnnn

SEQ ID NO: 3285 - DNA, 25 bp, Artificial sequence
  Antisense oligomer
  misc_feature (1)  (25): each n is independently u or t
ngnnnnngnnnnnngnnngnnggnn

SEQ ID NO: 3286 - DNA, 18 bp, Artificial sequence
  Antisense oligomer
  misc_feature (1)  (18): each n is independently u or t
nngnngnnnnnggnnnng

SEQ ID NO: 3287 - DNA, 22 bp, Artificial sequence
  Antisense oligomer
  misc_feature (1)  (22): each n is independently u or t
nnnnngnngnnnnnggnnnngn

SEQ ID NO: 3288 - DNA, 23 bp, Artificial sequence
  Antisense oligomer
  misc_feature (1)  (23): each n is independently u or t
nnnnngnngnnnnnggnnnngnn

SEQ ID NO: 3289 - DNA, 24 bp, Artificial sequence
  Antisense oligomer
  misc_feature (1)  (24): each n is independently u or t
nnnnngnngnnnnnggnnnngnng

SEQ ID NO: 3290 - DNA, 22 bp, Artificial sequence
  Antisense oligomer
  misc_feature (1)  (22): each n is independently u or t
nngnngnnnnnggnnnngnngg

SEQ ID NO: 3291 - DNA, 23 bp, Artificial sequence
  Antisense oligomer
  misc_feature (1)  (23): each n is independently u or t
nngnngnnnnnggnnnngnnggn

SEQ ID NO: 3292 - DNA, 24 bp, Artificial sequence
  Antisense oligomer
  misc_feature (1)  (24): each n is independently u or t
nngnngnnnnnggnnnngnnggng

SEQ ID NO: 3293 - DNA, 25 bp, Artificial sequence
  Antisense oligomer
  misc_feature (1)  (25): each n is independently u or t
nngnngnnnnnggnnnngnnggngn

SEQ ID NO: 3294 - DNA, 25 bp, Artificial sequence
  Antisense oligomer
  misc_feature (1)  (25): each n is independently u or t
gnngnnnnnggnnnngnnggngnnn

SEQ ID NO: 3295 - DNA, 25 bp, Artificial sequence
  Antisense oligomer
  misc_feature (1)  (25): each n is independently u or t
gnnnnnggnnnngnnggngnnnnng

SEQ ID NO: 3296 - DNA, 30 bp, Artificial sequence
  Antisense oligomer
  misc_feature (1)  (30): each n is independently u or t
nngnnnnnggnnnngnnggngnnnnngnnn

SEQ ID NO: 3297 - DNA, 30 bp, Artificial sequence
  Antisense oligomer
  misc_feature (1)  (30): each n is independently u or t
nngnngnnnnnggnnnngnnggngnnnnng

SEQ ID NO: 3298 - DNA, 33 bp, Artificial sequence
  Antisense oligomer
  misc_feature (1)  (33): each n is independently u or t
nnnnngnngnnnnnggnnnngnnggngnnnnng

SEQ ID NO: 3299 - DNA, 24 bp, Artificial sequence
  Antisense oligomer
  misc_feature (1)  (24): each n is independently u or t
gngnnnnnnnnnnngnngnnnnnn

SEQ ID NO: 3300 - DNA, 25 bp, Artificial sequence
  Antisense oligomer
  misc_feature (1)  (25): each n is independently u or t
nnngngnnnnnnnnnnngnngnnnn

SEQ ID NO: 3301 - DNA, 24 bp, Artificial sequence
  Antisense oligomer
  misc_feature (1)  (24): each n is independently u or t
ngnnnnnngnnggnnnnnggnngn

SEQ ID NO: 3302 - DNA, 24 bp, Artificial sequence
  Antisense oligomer
  misc_feature (1)  (24): each n is independently u or t
nnnnnngnnggnnnnnggnngnng

SEQ ID NO: 3303 - DNA, 24 bp, Artificial sequence
  Antisense oligomer
  misc_feature (1)  (24): each n is independently u or t
nnnngnnggnnnnnggnngnngnn

SEQ ID NO: 3304 - DNA, 24 bp, Artificial sequence
  Antisense oligomer
  misc_feature (1)  (24): each n is independently u or t
nngnnggnnnnnggnngnngnnnn

SEQ ID NO: 3305 - DNA, 13 bp, Artificial sequence
  Antisense oligomer
  misc_feature (1)  (13): each n is independently u or t
nnnnnnnnnnngn

SEQ ID NO: 3306 - DNA, 15 bp, Artificial sequence
  Antisense oligomer
  misc_feature (1)  (15): each n is independently u or t
ngnnnnngnnngnnn

SEQ ID NO: 3307 - DNA, 11 bp, Artificial sequence
  Antisense oligomer
  misc_feature (1)  (11): each n is independently u or t
nnnnnnnggnn

SEQ ID NO: 3308 - DNA, 14 bp, Artificial sequence
  Antisense oligomer
  misc_feature (1)  (14): each n is independently u or t
nnnngnnnnnngnn

SEQ ID NO: 3309 - DNA, 20 bp, Artificial sequence
  Antisense oligomer
  misc_feature (1)  (20): each n is independently u or t
nnnnnnnnnnngnnnngnnn

SEQ ID NO: 3310 - DNA, 13 bp, Artificial sequence
  Antisense oligomer
  misc_feature (1)  (13): each n is independently u or t
nnnnnnnnnnngn

SEQ ID NO: 3311 - DNA, 12 bp, Artificial sequence
  Antisense oligomer
  misc_feature (1)  (12): each n is independently u or t
nnngnnnngnnn

SEQ ID NO: 3312 - DNA, 20 bp, Artificial sequence
  Antisense oligomer
  misc_feature (1)  (20): each n is independently u or t
nnngnngnngnnnnnngnnn

SEQ ID NO: 3313 - DNA, 20 bp, Artificial sequence
  Antisense oligomer
  misc_feature (1)  (20): each n is independently u or t
ngnngnnnnnngnnnnnnng

SEQ ID NO: 3314 - DNA, 20 bp, Artificial sequence
  Antisense oligomer
  misc_feature (1)  (20): each n is independently u or t
gnngnngnnnnnngnnnnnn

SEQ ID NO: 3315 - DNA, 13 bp, Artificial sequence
  Antisense oligomer
  misc_feature (1)  (13): each n is independently u or t
nnggnngnnggnn

SEQ ID NO: 3316 - DNA, 12 bp, Artificial sequence
  Antisense oligomer
  misc_feature (1)  (12): each n is independently u or t
nggnngnnggnn

SEQ ID NO: 3317 - DNA, 10 bp, Artificial sequence
  Antisense oligomer
  misc_feature (1)  (10): each n is independently u or t
ngngnnggnn

SEQ ID NO: 3318 - DNA, 14 bp, Artificial sequence
  Antisense oligomer
  misc_feature (1)  (14): each n is independently u or t
ngnnggnnnnnnnn

SEQ ID NO: 3319 - DNA, 10 bp, Artificial sequence
  Antisense oligomer
  misc_feature (1)  (10): each n is independently u or t
nnnnnnnnnn

SEQ ID NO: 3320 - DNA, 15 bp, Artificial sequence
  Antisense oligomer
  misc_feature (1)  (15): each n is independently u or t
nnngngnnnnnnnnn

SEQ ID NO: 3321 - DNA, 13 bp, Artificial sequence
  Antisense oligomer
  misc_feature (1)  (13): each n is independently u or t
nngngnnnnnnnn

SEQ ID NO: 3322 - DNA, 10 bp, Artificial sequence
  Antisense oligomer
  misc_feature (1)  (10): each n is independently u or t
ngnnnnnnnn

SEQ ID NO: 3323 - DNA, 10 bp, Artificial sequence
  Antisense oligomer
  misc_feature (1)  (10): each n is independently u or t
ngnnnnnngn

SEQ ID NO: 3324 - DNA, 20 bp, Artificial sequence
  Antisense oligomer
  misc_feature (1)  (20): each n is independently u or t
gnngnnnnnggnnnngnngg

SEQ ID NO: 3325 - DNA, 20 bp, Artificial sequence
  Antisense oligomer
  misc_feature (1)  (20): each n is independently u or t
nnnnggnnnngnnggngnnn

SEQ ID NO: 3326 - DNA, 17 bp, Artificial sequence
  Antisense oligomer
  misc_feature (1)  (17): each n is independently u or t
nnnnnggnnnngnnggn

SEQ ID NO: 3327 - DNA, 16 bp, Artificial sequence
  Antisense oligomer
  misc_feature (1)  (16): each n is independently u or t
ngnnnnnnnnnnngnn

SEQ ID NO: 3328 - DNA, 11 bp, Artificial sequence
  Antisense oligomer
  misc_feature (1)  (11): each n is independently u or t
ngnnnnnnnnn

SEQ ID NO: 3329 - DNA, 22 bp, Artificial sequence
  Antisense oligomer
  misc_feature (1)  (22): each n is independently u or t
ngnnnnnngnnggnnnnnggnn

SEQ ID NO: 3330 - DNA, 11 bp, Artificial sequence
  Antisense oligomer
  misc_feature (1)  (11): each n is independently u or t
ngnnnnnngnn

SEQ ID NO: 3331 - DNA, 11 bp, Artificial sequence
  Antisense oligomer
  misc_feature (1)  (11): each n is independently u or t
nnnnngnnggn

SEQ ID NO: 3332 - DNA, 12 bp, Artificial sequence
  Antisense oligomer
  misc_feature (1)  (12): each n is independently u or t
nggnnnnnggnn

SEQ ID NO: 3333 - DNA, 25 bp, Artificial sequence
  Antisense oligomer
guugccuccgguucugaagguguuc

SEQ ID NO: 3334 - DNA, 25 bp, Artificial sequence
  Antisense oligomer
  misc_feature (1)..(25): each n is independently u or t
guugnnunngguunugaagguguun

SEQ ID NO: 3335 - DNA, 25 bp, Artificial sequence
  Antisense oligomer
caacaucaaggaagauggcauuucu

SEQ ID NO: 3336 - DNA, 19 bp, Artificial sequence
  Antisense oligomer
gccauuucucaacagaucu

SEQ ID NO: 3337 - DNA, 20 bp, Artificial sequence
  Antisense oligomer
ucagcuucuguuagccacug

SEQ ID NO: 3338 - DNA, 20 bp, Artificial sequence
  Antisense oligomer
uuuguauuuagcauguuccc

SEQ ID NO: 3339 - DNA, 23 bp, Artificial sequence
  Antisense oligomer
auucucaggaauuugugucuuuc

SEQ ID NO: 3340 - DNA, 23 bp, Artificial sequence
  Antisense oligomer
ccauuuguauuuagcauguuccc

SEQ ID NO: 3341 - DNA, 21 bp, Artificial sequence
  Antisense oligomer
ucucaggaauuugugucuuuc

SEQ ID NO: 3342 - DNA, 23 bp, Artificial sequence
  Antisense oligomer
gccauuucucaacagaucuguca

SEQ ID NO: 3343 - DNA, 25 bp, Artificial sequence
  Antisense oligomer
uuugccgcugcccaaugccauccug

SEQ ID NO: 3344 - DNA, 24 bp, Artificial sequence
  Antisense oligomer
uugccgcugcccaaugccauccug

SEQ ID NO: 3345 - DNA, 25 bp, Artificial sequence
  Antisense oligomer
uugccgcugcccaaugccauccugg

SEQ ID NO: 3346 - DNA, 23 bp, Artificial sequence
  Antisense oligomer
ugccgcugcccaaugccauccug

SEQ ID NO: 3347 - DNA, 24 bp, Artificial sequence
  Antisense oligomer
ugccgcugcccaaugccauccugg

SEQ ID NO: 3348 - DNA, 22 bp, Artificial sequence
  Antisense oligomer
gccgcugcccaaugccauccug

SEQ ID NO: 3349 - DNA, 22 bp, Artificial sequence
  Antisense oligomer
ccgcugcccaaugccauccugg

SEQ ID NO: 3350 - DNA, 25 bp, Artificial sequence
  Antisense oligomer
  misc_feature (1)..(25): each n is independently u or t
uuugccncugcccaaugccauccug

SEQ ID NO: 3351 - DNA, 25 bp, Artificial sequence
  Antisense oligomer
caguuugccgcugcccaaugccauc

SEQ ID NO: 3352 - DNA, 30 bp, Artificial sequence
  Antisense oligomer
caguuugccgcugcccaaugccauccugga

SEQ ID NO: 3353 - DNA, 20 bp, Artificial sequence
  Antisense oligomer
ucaaggaagauggcauuucu

SEQ ID NO: 3354 - DNA, 17 bp, Artificial sequence
  Antisense oligomer
uggcauuucuaguuugg

SEQ ID NO: 3355 - DNA, 22 bp, Artificial sequence
  Antisense oligomer
caucaaggaagauggcauuucu

SEQ ID NO: 3356 - DNA, 25 bp, Artificial sequence
  Antisense oligomer
caacaucaaggaagauggcauuucu

SEQ ID NO: 3357 - DNA, 23 bp, Artificial sequence
  Antisense oligomer
ccucugugauuuuauaacuugau

SEQ ID NO: 3358 - DNA, 23 bp, Artificial sequence
  Antisense oligomer
ccagagcagguaccuccaacauc

SEQ ID NO: 3359 - DNA, 30 bp, Artificial sequence; identical to SEQ ID NO: 79
  Antisense oligomer

SEQ ID NO: 3360 - DNA, 25 bp, Artificial sequence
  Antisense oligomer
acaucaaggaagauggcauuucuag

SEQ ID NO: 3361 - DNA, 25 bp, Artificial sequence
  Antisense oligomer
cucuugauugcuggucuuguuuuuc

SEQ ID NO: 3362 - DNA, 22 bp, Artificial sequence
  Antisense oligomer
gguaaugaguucuuccaacugg

SEQ ID NO: 3363 - DNA, 25 bp, Artificial sequence
  Antisense oligomer
ucuugauugcuggucuuguuuuuca

SEQ ID NO: 3364 - DNA, 25 bp, Artificial sequence
  Antisense oligomer
uuccaacuggggacgccucuguucc

SEQ ID NO: 3365 - DNA, 25 bp, Artificial sequence
  Antisense oligomer
uguucuagccucuugauugcugguc

SEQ ID NO: 3366 - DNA, 18 bp, Artificial sequence
  Antisense oligomer
cuguugccuccgguucug

SEQ ID NO: 3367 - DNA, 22 bp, Artificial sequence
  Antisense oligomer
caacuguugccuccgguucuga

SEQ ID NO: 3368 - DNA, 23 bp, Artificial sequence
  Antisense oligomer
caacuguugccuccgguucugaa

SEQ ID NO: 3369 - DNA, 24 bp, Artificial sequence
  Antisense oligomer
caacuguugccuccgguucugaag

SEQ ID NO: 3370 - DNA, 22 bp, Artificial sequence
  Antisense oligomer
cuguugccuccgguucugaagg

SEQ ID NO: 3371 - DNA, 23 bp, Artificial sequence
  Antisense oligomer
cuguugccuccgguucugaaggu

SEQ ID NO: 3372 - DNA, 24 bp, Artificial sequence
  Antisense oligomer
cuguugccuccgguucugaaggug

SEQ ID NO: 3373 - DNA, 25 bp, Artificial sequence
  Antisense oligomer
cuguugccuccgguucugaaggugu

SEQ ID NO: 3374 - DNA, 25 bp, Artificial sequence
  Antisense oligomer
guugccuccgguucugaagguguuc

SEQ ID NO: 3375 - DNA, 25 bp, Artificial sequence
  Antisense oligomer
gccuccgguucugaagguguucuug

SEQ ID NO: 3376 - DNA, 30 bp, Artificial sequence
  Antisense oligomer
uugccuccgguucugaagguguucuuguac

SEQ ID NO: 3377 - DNA, 30 bp, Artificial sequence
  Antisense oligomer
cuguugccuccgguucugaagguguucuug

SEQ ID NO: 3378 - DNA, 33 bp, Artificial sequence
  Antisense oligomer
caacuguugccuccgguucugaagguguucuug

SEQ ID NO: 3379 - DNA, 24 bp, Artificial sequence
  Antisense oligomer
gaguuucuuccaaagcagccucuc

SEQ ID NO: 3380 - DNA, 25 bp, Artificial sequence
  Antisense oligomer
uaugaguuucuuccaaagcagccuc

SEQ ID NO: 3381 - DNA, 24 bp, Artificial sequence
  Antisense oligomer
agcauccuguaggacauuggcagu

SEQ ID NO: 3382 - DNA, 24 bp, Artificial sequence
  Antisense oligomer
cauccuguaggacauuggcaguug

SEQ ID NO: 3383 - DNA, 24 bp, Artificial sequence
  Antisense oligomer
uccuguaggacauuggcaguuguu

SEQ ID NO: 3384 - DNA, 24 bp, Artificial sequence
  Antisense oligomer
cuguaggacauuggcaguuguuuc

SEQ ID NO: 3385 - DNA, 13 bp, Artificial sequence
  Antisense oligomer
auuucucaacaga

SEQ ID NO: 3386 - DNA, 15 bp, Artificial sequence
  Antisense oligomer
agcuucuguuagcca

SEQ ID NO: 3387 - DNA, 11 bp, Artificial sequence
  Antisense oligomer
auucucaggaa

SEQ ID NO: 3388 - DNA, 14 bp, Artificial sequence
  Antisense oligomer
auuuguauuuagca

SEQ ID NO: 3389 - DNA, 20 bp, Artificial sequence
  Antisense oligomer
auuucucaacagaucuguca

SEQ ID NO: 3390 - DNA, 13 bp, Artificial sequence
  Antisense oligomer
auuucucaacaga

SEQ ID NO: 3391 - DNA, 12 bp, Artificial sequence
  Antisense oligomer
acagaucuguca

SEQ ID NO: 3392 - DNA, 20 bp, Artificial sequence
  Antisense oligomer
uuugccgcugcccaaugcca

SEQ ID NO: 3393 - DNA, 20 bp, Artificial sequence
  Antisense oligomer
cgcugcccaaugccauccug

SEQ ID NO: 3394 - DNA, 20 bp, Artificial sequence
  Antisense oligomer
gccgcugcccaaugccaucc

SEQ ID NO: 3395 - DNA, 13 bp, Artificial sequence
  Antisense oligomer
aaggaagauggca

SEQ ID NO: 3396 - DNA, 12 bp, Artificial sequence
  Antisense oligomer
aggaagauggca

SEQ ID NO: 3397 - DNA, 10 bp, Artificial sequence
  Antisense oligomer
agagcaggua

SEQ ID NO: 3398 - DNA, 14 bp, Artificial sequence
  Antisense oligomer
agcagguaccucca

SEQ ID NO: 3399 - DNA, 10 bp, Artificial sequence
  Antisense oligomer
accuccaaca

SEQ ID NO: 3400 - DNA, 15 bp, Artificial sequence
  Antisense oligomer
aaugaguucuuccaa

SEQ ID NO: 3401 - DNA, 13 bp, Artificial sequence
  Antisense oligomer
augaguucuucca

SEQ ID NO: 3402 - DNA, 10 bp, Artificial sequence
  Antisense oligomer
aguucuucca

SEQ ID NO: 3403 - DNA, 10 bp, Artificial sequence
  Antisense oligomer
agccucuuga

SEQ ID NO: 3404 - DNA, 20 bp, Artificial sequence
  Antisense oligomer
guugccuccgguucugaagg

SEQ ID NO: 3405 - DNA, 20 bp, Artificial sequence
  Antisense oligomer
cuccgguucugaagguguuc

SEQ ID NO: 3406 - DNA, 17 bp, Artificial sequence
  Antisense oligomer
ccuccgguucugaaggu

SEQ ID NO: 3407 - DNA, 16 bp, Artificial sequence
  Antisense oligomer
aguuucuuccaaagca

SEQ ID NO: 3408 - DNA, 11 bp, Artificial sequence
  Antisense oligomer
aguuucuucca

SEQ ID NO: 3409 - DNA, 22 bp, Artificial sequence
  Antisense oligomer
agcauccuguaggacauuggca

SEQ ID NO: 3410 - DNA, 11 bp, Artificial sequence
  Antisense oligomer
agcauccugua

SEQ ID NO: 3411 - DNA, 11 bp, Artificial sequence
  Antisense oligomer
auccuguagga

SEQ ID NO: 3412 - DNA, 12 bp, Artificial sequence
  Antisense oligomer
aggacauuggca

SEQ ID NO: 3413 - DNA, 22 bp, Artificial sequence
  Antisense oligomer
  misc_feature (1)  (22): each n is independently u or t
gguaaugaguunuunnaanugg

SEQ ID NO: 3414 - DNA, 22 bp, Artificial sequence
  Antisense oligomer
  misc_feature (1)  (22): each n is independently u or t
ggnaangagnncnnccaacngg

SEQ ID NO: 3415 - DNA, 22 bp, Artificial sequence
  Antisense oligomer
  misc_feature (1)  (22): each n is independently u or t
ggunnugnguucuuccnncugg

SEQ ID NO: 3416 - DNA, 22 bp, Artificial sequence
  Antisense oligomer
  misc_feature (1)  (22): each n is independently u or t
ggnaangagnnnnnnnaanngg

SEQ ID NO: 3417 - DNA, 22 bp, Artificial sequence
  Antisense oligomer
  misc_feature (1)  (22): each n is independently u or t
ggunnugnguunuunnnnnugg

SEQ ID NO: 3418 - DNA, 22 bp, Artificial sequence
  Antisense oligomer
  misc_feature (1)  (22): each n is independently u or t
ggnnnngngnncnnccnncngg

SEQ ID NO: 3419 - DNA, 22 bp, Artificial sequence
  Antisense oligomer
  misc_feature (1)  (22): each n is independently u or t
ggnnnngngnnnnnnnnnnngg

SEQ ID NO: 3420 - DNA, 25 bp, Artificial sequence
  Antisense oligomer
  misc_feature (1)  (25): each n is independently u or t
uguunuagnnunuugauugnuggun

SEQ ID NO: 3421 - DNA, 25 bp, Artificial sequence
  Antisense oligomer
  misc_feature (1)  (25): each n is independently u or t
ngnncnagccncnnganngcnggnc

SEQ ID NO: 3422 - DNA, 25 bp, Artificial sequence
  Antisense oligomer
  misc_feature (1)  (25): each n is independently u or t
uguucungccucuugnuugcugguc

SEQ ID NO: 3423 - DNA, 25 bp, Artificial sequence
  Antisense oligomer
  misc_feature (1)  (25): each n is independently u or t
ngnnnnagnnnnnnganngnnggnn

SEQ ID NO: 3424 - DNA, 25 bp, Artificial sequence
  Antisense oligomer
  misc_feature (1)  (25): each n is independently u or t
uguunungnnunuugnuugnuggun

SEQ ID NO: 3425 - DNA, 25 bp, Artificial sequence
  Antisense oligomer
  misc_feature (1)  (25): each n is independently u or t
ngnncnngccncnngnnngcnggnc

SEQ ID NO: 3426 - DNA, 25 bp, Artificial sequence
  Antisense oligomer
  misc_feature (1)  (25): each n is independently u or t
ngnnnnngnnnnnngnnngnnggnn

SEQ ID NO: 3427 - DNA, 24 bp, Artificial sequence
  Antisense oligomer
  misc_feature (1)  (24): each n is independently u or t
gaguuunuunnaaagnagnnunun

SEQ ID NO: 3428 - DNA, 24 bp, Artificial sequence
  Antisense oligomer
  misc_feature (1)  (24): each n is independently u or t
gagnnncnnccaaagcagccncnc

SEQ ID NO: 3429 - DNA, 24 bp, Artificial sequence
  Antisense oligomer
  misc_feature (1)  (24): each n is independently u or t
gnguuucuuccnnngcngccucuc

SEQ ID NO: 3430 - DNA, 24 bp, Artificial sequence
  Antisense oligomer
  misc_feature (1)  (24): each n is independently u or t
gagnnnnnnnnaaagnagnnnnnn

SEQ ID NO: 3431 - DNA, 24 bp, Artificial sequence
  Antisense oligomer
  misc_feature (1)  (24): each n is independently u or t
gnguuunuunnnnngnngnnunun

SEQ ID NO: 3432 - DNA, 24 bp, Artificial sequence
  Antisense oligomer
  misc_feature (1)  (24): each n is independently u or t
gngnnncnnccnnngcngccncnc

SEQ ID NO: 3433 - DNA, 24 bp, Artificial sequence
  Antisense oligomer
  misc_feature (1)  (24): each n is independently u or t
gngnnnnnnnnnnngnngnnnnnn

SEQ ID NO: 3434 - DNA, 24 bp, Artificial sequence
  Antisense oligomer
  misc_feature (1)  (24): each n is independently u or t
agnaunnuguagganauuggnagu

SEQ ID NO: 3435 - DNA, 24 bp, Artificial sequence
  Antisense oligomer
  misc_feature (1)  (24): each n is independently u or t
agcanccngnaggacannggcagn

SEQ ID NO: 3436 - DNA, 24 bp, Artificial sequence
  Antisense oligomer
  misc_feature (1)  (24): each n is independently u or t
ngcnuccugunggncnuuggcngu

SEQ ID NO: 3437 - DNA, 24 bp, Artificial sequence
  Antisense oligomer
  misc_feature (1)  (24): each n is independently u or t
agnannnngnagganannggnagn

SEQ ID NO: 3438 - DNA, 24 bp, Artificial sequence
  Antisense oligomer
  misc_feature (1)  (24): each n is independently u or t
ngnnunnugunggnnnuuggnngu

SEQ ID NO: 3439 - DNA, 24 bp, Artificial sequence
  Antisense oligomer
  misc_feature (1)  (24): each n is independently u or t
ngcnnccngnnggncnnnggcngn

SEQ ID NO: 3440 - DNA, 24 bp, Artificial sequence
  Antisense oligomer
  misc_feature (1)  (24): each n is independently u or t
ngnnnnnngnnggnnnnnggnngn

SEQ ID NO: 3441 - DNA, 25 bp, Artificial sequence
  Antisense oligomer
  misc_feature (1)  (25): each n is independently u or t
guugnnunngguunugaagguguun

SEQ ID NO: 3442 - DNA, 25 bp, Artificial sequence
  Antisense oligomer
  misc_feature (1)  (25): each n is independently u or t
uuugnngnugnnnaaugnnaunnug

SEQ ID NO: 3443 - DNA, 25 bp, Artificial sequence
  Antisense oligomer
  misc_feature (1)  (25): each n is independently u or t
nunuugauugnuggunuuguuuuun

SEQ ID NO: 3444 - DNA, 20 bp, Artificial sequence
  Antisense oligomer
  misc_feature (1)  (20): each n is independently u or t
ncaaggaaganggcannncn

SEQ ID NO: 3445 - DNA, 20 bp, Artificial sequence
  Antisense oligomer
  misc_feature (1)  (20): each n is independently u or t
nnaaggaaganggnannnnn

SEQ ID NO: 3446 - DNA, 20 bp, Artificial sequence
  Antisense oligomer
  misc_feature (1)  (20): each n is independently u or t
ncagcnncngnnagccacng

SEQ ID NO: 3447 - DNA, 20 bp, Artificial sequence
  Antisense oligomer
  misc_feature (1)  (20): each n is independently u or t
nnagnnnnngnnagnnanng

SEQ ID NO: 3448 - DNA, 20 bp, Artificial sequence
  Antisense oligomer
  misc_feature (1)  (20): each n is independently u or t
ucnnggnngnuggcnuuucu

SEQ ID NO: 3449 - DNA, 20 bp, Artificial sequence
  Antisense oligomer
  misc_feature (1)  (20): each n is independently u or t
ucngcuucuguungccncug

SEQ ID NO: 3450 - DNA, 20 bp, Artificial sequence
  Antisense oligomer
  misc_feature (1)  (20): each n is independently u or t
unagnuunuguuagnnanug

SEQ ID NO: 3451 - DNA, 25 bp, Artificial sequence
  Antisense oligomer
  misc_feature (1)  (25): each n is independently u or t
nnngnngnngnnnaangnnannnng

SEQ ID NO: 3452 - DNA, 25 bp, Artificial sequence
  Antisense oligomer
  misc_feature (1)  (25): each n is independently u or t
uuugccgcugcccnnugccnuccug

SEQ ID NO: 3453 - DNA, 25 bp, Artificial sequence
  Antisense oligomer
  misc_feature (1)  (25): each n is independently u or t
gnngccnccggnncngaaggngnnc

SEQ ID NO: 3454 - DNA, 25 bp, Artificial sequence
  Antisense oligomer
  misc_feature (1)  (25): each n is independently u or t
gnngnnnnnggnnnngaaggngnnn

SEQ ID NO: 3455 - DNA, 25 bp, Artificial sequence
  Antisense oligomer
  misc_feature (1)  (25): each n is independently u or t
guugccuccgguucugnngguguuc

SEQ ID NO: 3456 - DNA, 20 bp, Artificial sequence
  Antisense oligomer
  misc_feature (1)  (20): each n is independently u or t
ggccaaaccncggcnnaccn

SEQ ID NO: 3457 - DNA, 20 bp, Artificial sequence
  Antisense oligomer
  misc_feature (1)  (20): each n is independently u or t
unaaggaagauggnauuunu

SEQ ID NO: 3458 - DNA, 20 bp, Artificial sequence
  Antisense oligomer
ggccaaaccucggcuuaccu

SEQ ID NO: 3459 - DNA, 25 bp, Artificial sequence
  Antisense oligomer
  misc_feature (1)  (25): each n is independently u or t
guugnnuccgguunugaagguguun

SEQ ID NO: 3460 - DNA, 25 bp, Artificial sequence
  Antisense oligomer
  misc_feature (1)  (25): each n is independently u or t
guugnnuccgguucugaagguguuc

SEQ ID NO: 3461 - DNA, 25 bp, Artificial sequence
  Antisense oligomer
  misc_feature (1)  (25): each n is independently u or t
guugcnuccgguunugaagguguun

SEQ ID NO: 3462 - DNA, 30 bp, Artificial sequence
  Antisense oligomer
  misc_feature (1)  (30): each n is independently u or t
ngaaaacgccgccannncncaacagancng

SEQ ID NO: 3463 - DNA, 30 bp, Artificial sequence
  Antisense oligomer
  misc_feature (1)  (30): each n is independently u or t
canaangaaaacgccgccannncncaacag

SEQ ID NO: 3464 - DNA, 30 bp, Artificial sequence
  Antisense oligomer
  misc_feature (1)  (30): each n is independently u or t
ngnncagcnncngnnagccacngannaaan

SEQ ID NO: 3465 - DNA, 30 bp, Artificial sequence
  Antisense oligomer
  misc_feature (1)  (30): each n is independently u or t
cagnnngccgcngcccaangccanccngga

SEQ ID NO: 3466 - DNA, 30 bp, Artificial sequence
  Antisense oligomer
  misc_feature (1)  (30): each n is independently u or t
nngccgcngcccaangccanccnggagnnc

SEQ ID NO: 3467 - DNA, 30 bp, Artificial sequence
  Antisense oligomer
  misc_feature (1)  (30): each n is independently u or t
ngcngcncnnnnccaggnncaagngggana

SEQ ID NO: 3468 - DNA, 30 bp, Artificial sequence
  Antisense oligomer
  misc_feature (1)  (30): each n is independently u or t
cnnnnagnngcngcncnnnnccaggnncaa

SEQ ID NO: 3469 - DNA, 30 bp, Artificial sequence
  Antisense oligomer
  misc_feature (1)  (30): each n is independently u or t
cnnnncnnnnagnngcngcncnnnnccagg

SEQ ID NO: 3470 - DNA, 30 bp, Artificial sequence
  Antisense oligomer
  misc_feature (1)  (30): each n is independently u or t
nnagnngcngcncnnnnccaggnncaagng

SEQ ID NO: 3471 - DNA, 30 bp, Artificial sequence
  Antisense oligomer
  misc_feature (1)  (30): each n is independently u or t
cngnngccnccggnncngaaggngnncnng

SEQ ID NO: 3472 - DNA, 30 bp, Artificial sequence
  Antisense oligomer
  misc_feature (1)  (30): each n is independently u or t
caacngnngccnccggnncngaaggngnnc

SEQ ID NO: 3473 - DNA, 30 bp, Artificial sequence
  Antisense oligomer
  misc_feature (1)  (30): each n is independently u or t
nngccnccggnncngaaggngnncnngnac

SEQ ID NO: 3474 - DNA, 30 bp, Artificial sequence; identical to SEQ ID NO: 1509
  Antisense oligomer

SEQ ID NO: 3475 - DNA, 30 bp, Artificial sequence
  Antisense oligomer
cataatgaaaacgccgccatttctcaacag

SEQ ID NO: 3476 - DNA, 30 bp, Artificial sequence
  Antisense oligomer
tgttcagcttctgttagccactgattaaat

SEQ ID NO: 3477 - DNA, 30 bp, Artificial sequence; identical to SEQ ID NO: 1447
  Antisense oligomer

SEQ ID NO: 3478 - DNA, 30 bp, Artificial sequence
  Antisense oligomer
ttgccgctgcccaatgccatcctggagttc

SEQ ID NO: 3479 - DNA, 30 bp, Artificial sequence
  Antisense oligomer
tgctgctcttttccaggttcaagtgggata

SEQ ID NO: 3480 - DNA, 30 bp, Artificial sequence
  Antisense oligomer
cttttagttgctgctcttttccaggttcaa

SEQ ID NO: 3481 - DNA, 30 bp, Artificial sequence
  Antisense oligomer
cttttcttttagttgctgctcttttccagg

SEQ ID NO: 3482 - DNA, 30 bp, Artificial sequence
  Antisense oligomer
ttagttgctgctcttttccaggttcaagtg

SEQ ID NO: 3483 - DNA, 30 bp, Artificial sequence; identical to SEQ ID NO: 296
  Antisense oligomer

SEQ ID NO: 3484 - DNA, 30 bp, Artificial sequence
  Antisense oligomer
caactgttgcctccggttctgaaggtgttc

SEQ ID NO: 3485 - DNA, 30 bp, Artificial sequence; identical to SEQ ID NO: 1357
  Antisense oligomer

SEQ ID NO: 3486 - protein, 9 aa, Artificial sequence
  Peptide transporter
RRRQRRKKR

SEQ ID NO: 3487 - protein, 9 aa, Artificial sequence
  Peptide transporter
RKKRRQRRR

SEQ ID NO: 3488 - protein, 11 aa, Artificial sequence
  Peptide transporter
RRRRRRRRRFF

SEQ ID NO: 3489 - protein, 11 aa, Artificial sequence
  Peptide transporter
RRRRRFFRRRR

SEQ ID NO: 3490 - protein, 4 aa, Artificial sequence
  Peptide transporter
RRRR

SEQ ID NO: 3491 - protein, 5 aa, Artificial sequence
  Peptide transporter
RRRRR

SEQ ID NO: 3492 - protein, 6 aa, Artificial sequence
  Peptide transporter
RRRRRR

SEQ ID NO: 3493 - protein, 7 aa, Artificial sequence
  Peptide transporter
RRRRRRR

SEQ ID NO: 3494 - protein, 8 aa, Artificial sequence
  Peptide transporter
RRRRRRRR

SEQ ID NO: 3495 - protein, 9 aa, Artificial sequence
  Peptide transporter
RRRRRRRRR

SEQ ID NO: 3496 - protein, 16 aa, Artificial sequence
  Peptide transporter
  MOD_RES (1)..(16): Xaa = 6-aminohexanoic acid
RXRXRXRXRXRXRXRX

SEQ ID NO: 3497 - protein, 12 aa, Artificial sequence
  Peptide transporter
  MOD_RES (1)..(12): Xaa = 6-aminohexanoic acid
RXRRXRRXRRXR

SEQ ID NO: 3498 - protein, 15 aa, Artificial sequence
  Peptide transporter
  MOD_RES (1)..(15): Xaa = 6-aminohexanoic acid
RXRRXRRXRRXRRXR

SEQ ID NO: 3499 - protein, 12 aa, Artificial sequence
  Peptide transporter
  MOD_RES (2)..(2): Xaa = 6-aminohexanoic acid
  MOD_RES (5)..(5): Xaa = beta-alanine
  MOD_RES (8)..(8): Xaa = 6-aminohexanoic acid
  MOD_RES (11)..(11): Xaa = beta-alanine
RXRRXRRXRRXR

SEQ ID NO: 3500 - protein, 14 aa, Artificial sequence
  Peptide transporter
RARRARRARRARFF

SEQ ID NO: 3501 - protein, 14 aa, Artificial sequence
  Peptide transporter
RGRRGRRGRRGRFF

SEQ ID NO: 3502 - protein, 375 aa, Homo sapiens
MQKLQLCVYIYLFMLIVAGPVDLNENSEQKENVEKEGLCNACTWRQNTKSSRIEAIKIQILSKLRLETAPNISKDVIRQLLPKAPPLRELIDQYDVQRDDSSDGSLEDDDYHATTETIITMPTESDFLMQVDGKPKCCFFKFSSKIQYNKVVKAQLWIYLRPVETPTTVFVQILRLIKPMKDGTRYTGIRSLKLDMNPGTGIWQSIDVKTVLQNWLKQPESNLGIEIKALDENGHDLAVTFPGPGEDGLNPFLEVKVTDTPKRSRRDFGLDCDEHSTESRCCRYPLTVDFEAFGWDWIIAPKRYKANYCSGECEFVFLQKYPHTHLVHQANPRGSAGPCCTPTKMSPINMLYFNGKEQIIYGKIPAMVVDRCGCS

SEQ ID NO: 3503 - protein, 512 aa, Homo sapiens
MTAPWVALALLWGSLCAGSGRGEAETRECIYYNANWELERTNQSGLERCEGEQDKRLHCYASWRNSSGTIELVKKGCWLDDFNCYDRQECVATEENPQVYFCCCEGNFCNERFTHLPEAGGPEVTYEPPPTAPTLLTVLAYSLLPIGGLSLIVLLAFWMYRHRKPPYGHVDIHEDPGPPPPSPLVGLKPLQLLEIKARGRFGCVWKAQLMNDFVAVKIFPLQDKQSWQSEREIFSTPGMKHENLLQFIAAEKRGSNLEVELWLITAFHDKGSLTDYLKGNIITWNELCHVAETMSRGLSYLHEDVPWCRGEGHKPSIAHRDFKSKNVLLKSDLTAVLADFGLAVRFEPGKPPGDTHGQVGTRRYMAPEVLEGAINFQRDAFLRIDMYAMGLVLWELVSRCKAADGPVDEYMLPFEEEIGQHPSLEELQEVVVHKKMRPTIKDHWLKHPGLAQLCVTIEECWDHDAEARLSAGCVEERVSLIRRSVNGTTSDCLVSLVTSVTNVDLPPKESSI

SEQ ID NO: 3504 - protein, 14 aa, Artificial sequence
  Peptide transporter
  MOD_RES (2)..(2): Xaa = 6-aminohexanoic acid
  MOD_RES (5)..(5): Xaa = beta-alanine
  MOD_RES (8)..(8): Xaa = 6-aminohexanoic acid
  MOD_RES (11)..(11): Xaa = beta-alanine
  MOD_RES (13)..(13): Xaa = 6-aminohexanoic acid
  MOD_RES (14)..(14): Xaa = beta-alanine
RXRRXRRXRRXRXX
